(19) United States
(12) Patent Application Publication
(10) Pub. No.: US 2022/0119811 A1
(43) Pub. Date: Apr. 21, 2022

(54) ALPHA-SYNUCLEIN ANTISENSE OLIGONUCLEOTIDES AND USES THEREOF

(71) Applicant: Roche Innovation Center Copenhagen A/S, Hørsholm (DK)

(72) Inventors: Peter HAGEDORN, Hørsholm (DK); Richard E. OLSON, Cambridge, MA (US); Angela M. CACACE, Wallingford, CT (US); Marianne Lerbach JENSEN, Hørsholm (DK); Jeffrey M. BROWN, Medway, MA (US); Jere E. MEREDITH, JR., Princeton, NJ (US); Annapurna PENDRI, Princeton, NJ (US); Ivar M. MCDONALD, Wallingford, CT (US); Martin GILL, Princeton, NJ (US)

(73) Assignee: Roche Innovation Center Copenhagen A/S, Hørsholm (DK)

(21) Appl. No.: 15/733,369

(22) PCT Filed: Jan. 11, 2019
(86) PCT No.: PCT/EP2019/050661

§ 371 Date: Jul. 10, 2020

Related U.S. Application Data
(60) Provisional application No. 62/616,944, filed on Jan. 12, 2018.

(51) Int. Cl. C12N 15/113; A61K 47/54; A61P 25/16; A61K 31/7088

(52) U.S. Cl. CPC C12N 15/113; A61K 47/549; A61P 25/16; A61K 31/7088; C12N 2310/3513; C12N 2310/315; C12N 2310/3231; C12N 2310/341; C12N 2310/11

(57) ABSTRACT

The present disclosure relates to antisense oligonucleotides, which target Alpha-synuclein (SNCA) transcript in a cell, leading to reduced expression of SNCA protein. Reduction of SNCA protein expression is beneficial for the treatment of certain medical disorders, e.g., a neurological disorder such as a synucleinopathy.

### FIELD OF DISCLOSURE

[0001] The present disclosure relates to antisense oligomeric compounds (ASOs) that target alpha-synuclein (SNCA) transcript in a cell, leading to reduced expression of alpha-synuclein (SNCA) protein. Reduction of SNCA protein expression can be beneficial for a range of medical disorders, such as multiple system atrophy, Parkinson's disease, Parkinson's Disease Dementia (PDD), and dementia with Lewy bodies.

### BACKGROUND

[0002] Alpha-synuclein (SNCA), a member of the synuclein protein family, is a small soluble protein that is expressed primarily within the neural tissues. See Marques O et al., Cell Death Dis. 19: e350 (2012). It is expressed in many cell types but is predominantly localized within the presynaptic terminals of neurons. While the precise function has yet to be fully elucidated, SNCA has been suggested to play an important role in the regulation of synaptic transmission. For instance, SNCA functions as a molecular chaperone in the formation of SNARE complexes, which mediate the docking of synaptic vesicles with the presynaptic membranes of neurons. SNCA can also interact with other proteins like the microtubule-associated protein tau, which helps stabilize microtubules and regulate vesicle trafficking.

[0003] Due to SNCA's role in the regulation of synaptic transmission, alterations of SNCA expression and/or function can disrupt critical biological processes. Such disruptions have been thought to contribute to α-synucleinopathies, which are neurodegenerative diseases characterized by abnormal accumulation of SNCA protein aggregates within the brain. Accordingly, insoluble inclusions of misfolded, aggregated, and phosphorylated SNCA protein are a pathological hallmark for diseases such as Parkinson's disease (PD), Parkinson's Disease Dementia (PDD), dementia with Lewy bodies (DLB), and multiple system atrophy (MSA). See Galvin J E et al., Archives of Neurology 58: 186-190 (2001); and Valera E et al., J Neurochem 139 Suppl 1: 346-352 (October 2016)

[0004] α-Synucleinopathies, such as Parkinson's disease, are highly prevalent progressive neurodegenerative brain disorders, especially among the elderly. See Recchia A et al., FASEB J. 18: 617-26 (2004). It is estimated that approximately seven to ten million people worldwide are living with such disorders, with about 60,000 new cases each year in the United States alone. Medication costs for an individual person can easily exceed $2,500 a year and therapeutic surgery can cost up to $100,000 per patient. Therefore, a more robust and cost-effective treatment options are greatly needed.

[0005] US 2008/0003570 describes translation enhancer elements on alpha-synuclein methods for identifying compounds that modulate alpha-synuclein.

[0006] WO 2012/068405 discloses modified antisense oligonucleotides targeting alpha-synuclein.

[0007] WO 2005/004794, WO 2005/045034, WO 2006/039253, WO 2007/135426, US 2008/0139799, WO 2008/109509, WO 2009/079399, WO 2012/027713 all describe nucleic acid molecules acting via the RISC complex in the cytosol, such as siRNA molecules. Such molecules are not capable of targeting introns in the SNCA transcript.

[0008] WO 2011/041897, WO 2011/131693 and WO 2014/064257 describe conjugations of nucleic acid molecules for delivery to CNS to modulate target molecules in the CNS one of these being alpha-synuclein.

### SUMMARY OF DISCLOSURE

[0009] The present disclosure is directed to antisense oligonucleotide (ASOs) comprising a contiguous nucleotide sequence of 10 to 30 nucleotides in length wherein the contiguous nucleotide sequence is at least 90% complementary to an intron nucleic acid region within an alpha-synuclein (SNCA) transcript. In some embodiments, the SNCA transcript comprises SEQ ID NO: 1 and the ASOs of the present disclosure are capable of inhibiting the expression of the human SNCA transcript in a cell which is expressing the human SNCA transcript.

[0010] In some embodiments the intron region is selected from intron 1 corresponding to nucleotides 6336-7604 of SEQ ID NO: 1; intron 2 corresponding to nucleotides 7751-15112 of SEQ ID NO: 1; intron 3 corresponding to nucleotides 15155-20908 of SEQ ID NO: 1 or intron 4 corresponding to nucleotides 21052-114019 of SEQ ID NO: 1.

[0011] In further embodiments the antisense oligonucleotides (ASOs) comprising a contiguous nucleotide sequence of 10 to 30 nucleotides in length wherein the contiguous nucleotide sequence is at least 90% complementary to a nucleic acid sequence within an alpha-synuclein (SNCA) transcript, wherein the nucleic acid sequence is selected from the group consisting of; i) nucleotides 21052-29654 of SEQ ID NO: 1; ii) nucleotides 30931-33938 of SEQ ID NO: 1; iii) nucleotides 44640-44861 of SEQ ID NO: 1; iv) nucleotides 47924-58752 of SEQ ID NO: 1; v) nucleotides 4942-5343 of SEQ ID NO: 1; vi) nucleotides 6336-7041 of SEQ ID NO: 1; vii) nucleotides 7329-7600 of SEQ ID NO: 1; viii) nucleotides 7751-7783 of SEQ ID NO: 1; ix)nucleotides 8277-8501 of SEQ ID NO: 1; x) nucleotides 9034-9526 of SEQ ID NO: 1; xi) nucleotides 9982-14279 of SEQ ID NO: 1; xii)nucleotides 15204-19041 of SEQ ID NO: 1; xiii) nucleotides 20351-20908 of SEQ ID NO: 1; xiv) nucleotides 34932-37077 of SEQ ID NO: 1; xv)nucleotides 38081-42869 of SEQ ID NO: 1; xvi) nucleotides 38081-38303 of SEQ ID NO: 1; xvii)nucleotides 40218-42869 of SEQ ID NO: 1; xvii) nucleotides 46173-46920 of SEQ ID NO: 1; xix) nucleotides 60678-60905 of SEQ ID NO: 1; xx) nucleotides 62066-62397 of SEQ ID NO: 1; xxi) nucleotides 67759-71625 of SEQ ID NO: 1; xxii) nucleotides 72926-86991 of SEQ ID NO: 1; xxiii) nucleotides 88168-93783 of SEQ ID NO: 1; xxiv) nucleotides 94976-102573 of SEQ ID NO: 1; xxv) nucleotides 104920-107438 of SEQ ID NO: 1; xxvi) nucleotides 106378-106755 of SEQ ID NO: 1; xxvii) nucleotides 106700-106755 of SEQ ID NO: 1; xxviii) nucleotides 108948-114019 of SEQ ID NO: 1; and; xxix) nucleotides 114292-116636 of SEQ ID NO: 1.

[0012] In certain embodiments, the contiguous nucleotide sequence comprises or consists of consists of a sequence selected from SEQ ID NO: 7 to SEQ ID NO: 1302 or SEQ ID NO: 1309-1353.

[0013] In some embodiments, the contiguous nucleotide sequence comprises at least one nucleotide analogue. In some embodiments, the antisense oligonucleotide is a gapmer. The gapmer can be comprised of the formula of 5′-A-B-C-3′, wherein, (i) region B is a contiguous sequence of at least 6 DNA units, which are capable of recruiting RNase; (ii) region A is a first wing sequence of 1 to 10 nucleotides, wherein the first wing sequence comprises one or more nucleotide analogues and optionally one or more DNA units and wherein at least one of the nucleotide analogues is located at the 3′ end of A; and (iii) region C is a second wing sequence of 1 to 10 nucleotides, wherein the second wing sequence comprises one or more nucleotide analogues and optionally one or more DNA units and wherein at least one of the nucleotide analogues is located at the 5′ end of C.

[0014] In certain embodiments, the nucleotide analogue or analogues are high affinity analogues such as the 2′ sugar modified nucleosides selected from the group consisting of Locked Nucleic Acid (LNA); 2′-O-alkyl-RNA; 2′-amino-DNA; 2′-fluoro-DNA; arabino nucleic acid (ANA); 2′-fluoro-ANA, hexitol nucleic acid (HNA), intercalating nucleic acid (INA), constrained ethyl nucleoside (cEt), 2′-O-methyl nucleic acid (2′-OMe), 2′-O-methoxyethyl nucleic acid (2′-MOE), and any combination thereof. In some embodiments, the nucleotide analogue or analogues comprise a bicyclic sugar. In certain embodiments, the bicyclic sugar comprises cEt, 2′,4′-constrained 2′-O-methoxyethyl (cMOE), LNA, α-L-LNA, β-D-LNA, 2′-0,4′-C-ethylene-bridged nucleic acids (ENA), amino-LNA, oxy-LNA, or thio-LNA. In some embodiments, the nucleotide analogue or analogues comprise an LNA.

[0015] In some embodiments, the antisense oligonucleotide has an in vivo tolerability less than or equal to a total score of 4, wherein the total score is the sum of a unit score of five categories, which are 1) hyperactivity; 2) decreased activity and arousal; 3) motor dysfunction and/or ataxia; 4) abnormal posture and breathing; and 5) tremor and/or convulsions, and wherein the unit score for each category is measured on a scale of 0-4. In certain embodiments, the in vivo tolerability is less than or equal to the total score of 3, the total score of 2, the total score of 1, or the total score of 0.

[0016] In some embodiments, the nucleotide sequence of the antisense oligonucleotides comprises, consists essentially of, or consists of a sequence selected from the group consisting of from SEQ ID NO: 7 to SEQ ID NO: 1302 or SEQ ID NO: 1309-1353 with a design selected from the group consisting of the designs in FIGS. 1A to 1C, wherein the upper case letter is a sugar modified nucleoside and the lower case letter is DNA. In certain embodiments, the antisense oligonucleotide or the contiguous nucleotide sequence thereof has a the chemical structure selected from the group consisting of ASO-008387; ASO-008388; ASO-008501; ASO-008502; ASO-008529; ASO-008530; ASO-008531; ASO-008532; ASO-008533; ASO-008534; ASO-008535; ASO-008536; ASO-008537; ASO-008543; ASO-008545; ASO-008584; ASO-008226 and ASO-008261.

[0017] Also provided herein is a pharmaceutical composition comprising the antisense oligonucleotide or a conjugate thereof as disclosed herein and a pharmaceutically acceptable carrier.

[0018] The present disclosure further provides a kit comprising the antisense oligonucleotide, a conjugate thereof, or the composition as disclosed herein.

[0019] Provided herein is a method for treating a synucleinopathy in a subject in need thereof, comprising administering an effective amount of the antisense oligonucleotide, a conjugate thereof, or the composition of the present disclosure. In some embodiments, the synucleinopathy is selected from the group consisting of Parkinson's disease, Parkinson's Disease Dementia (PDD), multiple system atrophy, dementia with Lewy bodies, and any combinations thereof.

[0020] Also provided herein is a use of the antisense oligonucleotide, a conjugate thereof, or the composition of the present disclosure for the manufacture of a medicament. The present disclosure also provides the use of the antisense oligonucleotide, a conjugate thereof, or the composition for the manufacture of a medicament for the treatment of a synucleinopathy in a subject in need thereof. In some embodiments, the antisense oligonucleotide, a conjugate thereof, or the composition of the present disclosure are for use in therapy of a synucleinopathy in a subject in need thereof. In other embodiments, the antisense oligonucleotide, a conjugate thereof, or the composition of the present disclosure are for use in therapy.

[0021] In some embodiments, the subject is a human. In some embodiments, the antisense oligonucleotide, a conjugate thereof, or the compositions are administered orally, parenterally, intrathecally, intra-cerebroventricularly, pulmorarily, topically, or intraventricularly.

### BRIEF DESCRIPTION OF FIGURES

[0022] FIGS. 1A to 1C show exemplary ASOs targeting a region of the SNCA pre-mRNA. FIG. 1A provides exemplary ASOs that target the wild-type SNCA mRNA (SEQ ID NO: 2). FIG. 1B provides exemplary ASOs that target a variant SNCA mRNA (“variant 4”/SEQ ID NO: 5; or “variant 2”/SEQ ID NO: 3). FIG. 1C provides exemplary ASOs that target another variant SNCA mRNA (“variant 3”/SEQ ID NO: 4). Each column of FIGS. 1A to 1C show the Sequence ID number (SEQ ID No.) designated for the sequence only, the target start and end positions on the SNCA pre-mRNA sequence, the target start and end positions on the SNCA mRNA sequence, the design number (DES No.), the ASO sequence with a design, the ASO number (ASO No.), and the ASO sequence with a chemical structure. In the figures, the annotation of ASO chemistry is as follows Beta-D-oxy LNA nucleotides are designated by OxyB where B designates a nucleotide base such as thymine (T), uridine (U), cytosine (C), 5-methylcytosine (MC), adenine (A) or guanine (G), and thus include OxyA, OxyT, OxyMC, OxyC and OxyG. DNA nucleotides are designated by DNAb, where the lower case b designates a nucleotide base such as thymine (T), uridine (U), cytosine (C), 5-methylcytosine (Mc), adenine (A) or guanine (G), and thus include DNAa, DNAt, DNA and DNAg. The letter M before C or c indicates 5-methylcytosine. The letter s is a phosphorothioate internucleotide linkage.

[0023] FIG. 2 shows ASOs targeting SNCA pre-mRNA with exemplary wing design modification. Each column of FIG. 2 shows the Sequence ID number (SEQ ID No.) designated for the sequence only, the target start and end positions on the SNCA pre-mRNA sequence, the design number (DES No.), the ASO sequence with a design, the ASO number (ASO No.), and the ASO sequence with a chemical structure and wing design modification identified. DES-287033, DES-287041, DES-287053, DES-287965, DES-288902, DES-288903, DES-288905, DES-290315, and DES-292378 show various ASO designs possible for SEQ ID NO: 1467. DES-286762, DES-286785, and DES-286783 show various ASO designs possible for SEQ ID NO: 1764. For the ASO designs, the upper case letters indicate nucleotide analogues (e.g., LNA or 2′-O-Methyl (OMe)), and the lower case letters indicate DNAs. The upper case letters with or without underlines indicate the two letters can be different nucleotide analogues, e.g., LNA and 2′-O-Methyl. For example, the underlined upper letters can be 2′-O-Methyl while the upper letters without underlines are LNA. In the ASOs with chemical structure column, OMe is 2′-O-Methyl nucleotide, L is LNA, D is DNA, and the numbers followed by L or D mean the number of LNAs or DNAs

[0024] FIG. 3 shows the relative SNCA mRNA expression level (as a percentage of the vehicle control) in cyno monkeys after ASO-003179 administration. The animals received the vehicle control (circle), 8 mg of ASO-003179 (square), or 16 mg of ASO-003179 (triangle) via ICV injection. The animals were then sacrificed at 2 weeks post-dosing and the SNCA mRNA expression levels were assessed in the following tissues: medulla (top left panel), caudate putamen (top middle panel), pons (top right panel), cerebellum (bottom left panel), lumbar spinal cord (bottom middle panel), and frontal cortex (bottom right panel). Both the data for the individual animals and the mean are shown. The horizontal line marks the reference value of 100% (i.e., value at which the SNCA mRNA expression would be equivalent to expression level observed in the vehicle control group).

[0025] FIG. 4 shows the effect of ASO-003092 on SNCA mRNA expression level in the brain tissues of cyno monkeys. The animals were dosed with either 4 mg (square) or 8 mg (triangle) of ASO-003092 and then the SNCA mRNA expression level in the different brain tissues was assessed at 2 weeks post-dosing. Animals receiving the vehicle control were used as controls (circle). The SNCA mRNA expression level was assessed in the following tissues: medulla (top left panel), caudate putamen (top middle panel), pons (top right panel), cerebellum (bottom left panel), lumbar spinal cord (bottom middle panel), and frontal cortex (bottom right panel). The SNCA mRNA expression levels were normalized to the GAPDH and then shown as a percentage of the vehicle control. Both the data for the individual animals and the mean are shown. The horizontal line marks the reference value of 100% (i.e., value at which the SNCA mRNA expression would be equivalent to expression level observed in the vehicle control group).

### DETAILED DESCRIPTION OF DISCLOSURE

### I Definitions

[0026] It is to be noted that the term “a” or “an” entity refers to one or more of that entity; for example, “a nucleotide sequence,” is understood to represent one or more nucleotide sequences. As such, the terms “a” (or “an”), “one or more,” and “at least one” can be used interchangeably herein.

[0027] Furthermore, “and/or” where used herein is to be taken as specific disclosure of each of the two specified features or components with or without the other. Thus, the term “and/or” as used in a phrase such as “A and/or B” herein is intended to include “A and B,” “A or B,” “A” (alone), and “B” (alone). Likewise, the term “and/or” as used in a phrase such as “A, B, and/or C” is intended to encompass each of the following aspects: A, B, and C; A, B, or C; A or C; A or B; B or C; A and C; A and B; B and C; A (alone); B (alone); and C (alone).

[0028] It is understood that wherever aspects are described herein with the language “comprising,” otherwise analogous aspects described in terms of “consisting of” and/or “consisting essentially of” are also provided.

[0029] Unless defined otherwise, all technical and scientific terms used herein have the same meaning as commonly understood by one of ordinary skill in the art to which this disclosure is related. For example, the Concise Dictionary of Biomedicine and Molecular Biology, Juo, Pei-Show, 2nd ed., 2002, CRC Press; The Dictionary of Cell and Molecular Biology, 3rd ed., 1999, Academic Press; and the Oxford Dictionary Of Biochemistry And Molecular Biology, Revised, 2000, Oxford University Press, provide one of skill with a general dictionary of many of the terms used in this disclosure.

[0030] Units, prefixes, and symbols are denoted in their Systéme International de Unites (SI) accepted form. Numeric ranges are inclusive of the numbers defining the range. Unless otherwise indicated, nucleotide sequences are written left to right in 5′ to 3′ orientation. Amino acid sequences are written left to right in amino to carboxy orientation. The headings provided herein are not limitations of the various aspects of the disclosure, which can be had by reference to the specification as a whole. Accordingly, the terms defined immediately below are more fully defined by reference to the specification in its entirety.

[0031] The term “about” is used herein to mean approximately, roughly, around, or in the regions of. When the term “about” is used in conjunction with a numerical range, it modifies that range by extending the boundaries above and below the numerical values set forth. In general, the term “about” can modify a numerical value above and below the stated value by a variance of, e.g., 10 percent, up or down (higher or lower). For example, if it is stated that “the ASO reduces expression of SNCA protein in a cell following administration of the ASO by at least about 60%,” it is implied that the SNCA levels are reduced by a range of 50% to 70%.

[0032] The term “antisense oligonucleotide” (ASO) refers to an oligomer or polymer of nucleosides, such as naturally-occurring nucleosides or modified forms thereof, that are covalently linked to each other through internucleotide linkages. The ASO useful for the disclosure includes at least one non-naturally occurring nucleoside. An ASO is complementary to a target nucleic acid, such that the ASO hybridizes to the target nucleic acid sequence. The terms “antisense ASO,” “ASO,” and “oligomer” as used herein are interchangeable with the term “ASO.”

[0033] The term “nucleic acids” or “nucleotides” is intended to encompass plural nucleic acids. In some embodiments, the term “nucleic acids” or “nucleotides” refers to a target sequence, e.g., pre-mRNAs, mRNAs, or DNAs in vivo or in vitro. When the term refers to the nucleic acids or nucleotides in a target sequence, the nucleic acids or nucleotides can be naturally occurring sequences within a cell. In other embodiments, “nucleic acids” or “nucleotides” refer to a sequence in the ASOs of the disclosure. When the term refers to a sequence in the ASOs, the nucleic acids or nucleotides are not naturally occurring, i.e., chemically synthesized, enzymatically produced, recombinantly produced, or any combination thereof. In one embodiment, the nucleic acids or nucleotides in the ASOs are produced synthetically or recombinantly, but are not a naturally occurring sequence or a fragment thereof. In another embodiment, the nucleic acids or nucleotides in the ASOs are not naturally occurring because they contain at least one nucleotide analogue that is not naturally occurring in nature. The term “nucleic acid” or “nucleoside” refers to a single nucleic acid segment, e.g., a DNA, an RNA, or an analogue thereof, present in a polynucleotide. “Nucleic acid” or “nucleoside” includes naturally occurring nucleic acids or non-naturally occurring nucleic acids. In some embodiments, the terms “nucleotide”, “unit” and “monomer” are used interchangeably. It will be recognized that when referring to a sequence of nucleotides or monomers, what is referred to is the sequence of bases, such as A, T, G, C or U, and analogues thereof.

[0034] The term “nucleotide” as used herein, refers to a glycoside comprising a sugar moiety, a base moiety and a covalently linked group (linkage group), such as a phosphate or phosphorothioate internucleotide linkage group, and covers both naturally occurring nucleotides, such as DNA or RNA, and non-naturally occurring nucleotides comprising modified sugar and/or base, which are also referred to as “nucleotide analogues” herein. Herein, a single nucleotide (unit) can also be referred to as a monomer or nucleic acid unit. In certain embodiments, the term “nucleotide analogues” refers to nucleotides having modified sugar moieties. Non-limiting examples of the nucleotides having modified sugar moieties (e.g., LNA) are disclosed elsewhere herein. In other embodiments, the term “nucleotide analogues” refers to nucleotides having modified nucleobase moieties. The nucleotides having modified nucleobase moieties include, but are not limited to, 5-methylcytosine, isocytosine, pseudoisocytosine, 5-bromouracil, 5-propynyluracil, 6-aminopurine, 2-aminopurine, inosine, diaminopurine, and 2-chloro-6-aminopurine.

[0035] The term “nucleoside” as used herein is used to refer to a glycoside comprising a sugar moiety and a base moiety, which can be covalently linked by the internucleotide linkages between the nucleosides of the ASO. In the field of biotechnology, the term “nucleoside” is often used to refer to a nucleic acid monomer or unit. In the context of an ASO, the term “nucleoside” can refer to the base alone, i.e., a nucleobase sequence comprising cytosine (DNA and RNA), guanine (DNA and RNA), adenine (DNA and RNA), thymine (DNA) and uracil (RNA), in which the presence of the sugar backbone and internucleotide linkages are implicit. Likewise, particularly in the case of oligonucleotides where one or more of the internucleotide linkage groups are modified, the term “nucleotide” can refer to a “nucleoside.” For example, the term “nucleotide” can be used, even when specifying the presence or nature of the linkages between the nucleosides.

[0036] The term “nucleotide length” as used herein means the total number of the nucleotides (monomers) in a given sequence. For example, the sequence of ctaacaacttctgaacaaca (SEQ ID NO: 1436) has 20 nucleotides; thus the nucleotide length of the sequence is 20. The term “nucleotide length” is therefore used herein interchangeably with “nucleotide number.”

[0037] As one of ordinary skill in the art would recognize, the 5′ terminal nucleotide of an oligonucleotide does not comprise a 5′ internucleotide linkage group, although it can comprise a 5′ terminal group.

[0038] As used herein, a “coding region” or “coding sequence” is a portion of polynucleotide which consists of codons translatable into amino acids. Although a “stop codon” (TAG, TGA, or TAA) is typically not translated into an amino acid, it can be considered to be part of a coding region, but any flanking sequences, for example promoters, ribosome binding sites, transcriptional terminators, introns, untranslated regions (“UTRs”), and the like, are not part of a coding region. The boundaries of a coding region are typically determined by a start codon at the 5′ terminus, encoding the amino terminus of the resultant polypeptide, and a translation stop codon at the 3′ terminus, encoding the carboxyl terminus of the resulting polypeptide.

[0039] The term “non-coding region” as used herein means a nucleotide sequence that is not a coding region. Examples of non-coding regions include, but are not limited to, promoters, ribosome binding sites, transcriptional terminators, introns, untranslated regions (“UTRs”), non-coding exons and the like. Some of the exons can be wholly or part of the 5′ untranslated region (5′ UTR) or the 3′ untranslated region (3′ UTR) of each transcript. The untranslated regions are important for efficient translation of the transcript and for controlling the rate of translation and half-life of the transcript.

[0040] The term “region” when used in the context of a nucleotide sequence refers to a section of that sequence. For example, the phrase “region within a nucleotide sequence” or “region within the complement of a nucleotide sequence” refers to a sequence shorter than the nucleotide sequence, but longer than at least 10 nucleotides located within the particular nucleotide sequence or the complement of the nucleotides sequence, respectively. The term “sub-sequence” or “subsequence” or “target region” can also refer to a region of a nucleotide sequence.

[0041] The term “downstream,” when referring to a nucleotide sequence, means that a nucleic acid or a nucleotide sequence is located 3′ to a reference nucleotide sequence. In certain embodiments, downstream nucleotide sequences relate to sequences that follow the starting point of transcription. For example, the translation initiation codon of a gene is located downstream of the start site of transcription.

[0042] The term “upstream” refers to a nucleotide sequence that is located 5′ to a reference nucleotide sequence.

[0043] Unless otherwise indicated, the sequences provided herein are listed from 5′ end (left) to 3′ end (right).

[0044] As used herein, the term “regulatory region” refers to nucleotide sequences located upstream (5′ non-coding sequences), within, or downstream (3′ non-coding sequences) of a coding region, and which influence the transcription, RNA processing, stability, or translation of the associated coding region. Regulatory regions can include promoters, translation leader sequences, introns, polyadenylation recognition sequences, RNA processing sites, effector binding sites, UTRs, and stem-loop structures. If a coding region is intended for expression in a eukaryotic cell, a polyadenylation signal and transcription termination sequence will usually be located 3′ to the coding sequence.

[0045] The term “transcript” as used herein can refer to a primary transcript that is synthesized by transcription of DNA and becomes a messenger RNA (mRNA) after processing, i.e., a precursor messenger RNA (pre-mRNA), and the processed mRNA itself. The term “transcript” can be interchangeably used with “pre-mRNA” and “mRNA.” After DNA strands are transcribed to primary transcripts, the newly synthesized primary transcripts are modified in several ways to be converted to their mature, functional forms such as mRNA, tRNA, rRNA, lncRNA, miRNA and others. Thus, the term “transcript” can include exons, introns, 5′ UTRs, and 3′ UTRs.

[0046] The term “expression” as used herein refers to a process by which a polynucleotide produces a gene product, for example, a RNA or a polypeptide. It includes, without limitation, transcription of the polynucleotide into messenger RNA (mRNA) and the translation of an mRNA into a polypeptide. Expression produces a “gene product.” As used herein, a gene product can be either a nucleic acid, e.g., a messenger RNA produced by transcription of a gene, or a polypeptide which is translated from a transcript. Gene products described herein further include nucleic acids with post transcriptional modifications, e.g., polyadenylation or splicing, or polypeptides with post translational modifications, e.g., methylation, glycosylation, the addition of lipids, association with other protein subunits, or proteolytic cleavage.

[0047] The terms “identical” or percent “identity” in the context of two or more nucleic acids refer to two or more sequences that are the same or have a specified percentage of nucleotides or amino acid residues that are the same, when compared and aligned (introducing gaps, if necessary) for maximum correspondence, not considering any conservative amino acid substitutions as part of the sequence identity. The percent identity can be measured using sequence comparison software or algorithms or by visual inspection. Various algorithms and software are known in the art that can be used to obtain alignments of amino acid or nucleotide sequences.

[0048] One such non-limiting example of a sequence alignment algorithm is the algorithm described in Karlin et al., 1990, Proc. Natl. Acad. Sci., 87:2264-2268, as modified in Karlin et al., 1993, Proc. Natl. Acad. Sci., 90:5873-5877, and incorporated into the NBLAST and XBLAST programs (Altschul et al., 1991, Nucleic Acids Res., 25:3389-3402). In certain embodiments, Gapped BLAST can be used as described in Altschul et al., 1997, Nucleic Acids Res. 25:3389-3402. BLAST-2, WU-BLAST-2 (Altschul et al., 1996, Methods in Enzymology, 266:460-480), ALIGN, ALIGN-2 (Genentech, South San Francisco, Calif.) or Megalign (DNASTAR) are additional publicly available software programs that can be used to align sequences. In certain embodiments, the percent identity between two nucleotide sequences is determined using the GAP program in the GCG software package (e.g., using a NWSgapdna.CMP matrix and a gap weight of 40, 50, 60, 70, or 90 and a length weight of 1, 2, 3, 4, 5, or 6). In certain alternative embodiments, the GAP program in the GCG software package, which incorporates the algorithm of Needleman and Wunsch (J. Mol. Biol. (48):444-453 (1970)) can be used to determine the percent identity between two amino acid sequences (e.g., using either a BLOSUM 62 matrix or a PAM250 matrix, and a gap weight of 16, 14, 12, 10, 8, 6, or 4 and a length weight of 1, 2, 3, 4, 5). Alternatively, in certain embodiments, the percent identity between nucleotide or amino acid sequences is determined using the algorithm of Myers and Miller (CABIOS, 4:11-17 (1989)). For example, the percent identity can be determined using the ALIGN program (version 2.0) and using a PAM120 with residue table, a gap length penalty of 12 and a gap penalty of 4. One skilled in the art can determine appropriate parameters for maximal alignment by particular alignment software. In certain embodiments, the default parameters of the alignment software are used.

[0049] In certain embodiments, the percentage identity “X” of a first nucleotide sequence to a second nucleotide sequence is calculated as 100 x (Y/Z), where Y is the number of amino acid residues scored as identical matches in the alignment of the first and second sequences (as aligned by visual inspection or a particular sequence alignment program) and Z is the total number of residues in the second sequence. If the length of a first sequence is longer than the second sequence, the percent identity of the first sequence to the second sequence will be higher than the percent identity of the second sequence to the first sequence.

[0050] Different regions within a single polynucleotide target sequence that align with a polynucleotide reference sequence can each have their own percent sequence identity. It is noted that the percent sequence identity value is rounded to the nearest tenth. For example, 80.11, 80.12, 80.13, and 80.14 are rounded down to 80.1, while 80.15, 80.16, 80.17, 80.18, and 80.19 are rounded up to 80.2. It also is noted that the length value will always be an integer.

[0051] As used herein, the terms “homologous” and “homology” are interchangeable with the terms “identity” and “identical.”

[0052] The term “naturally occurring variant thereof” refers to variants of the SNCA polypeptide sequence or SNCA nucleic acid sequence (e.g., transcript) which exist naturally within the defined taxonomic group, such as mammalian, such as mouse, monkey, and human. Typically, when referring to “naturally occurring variants” of a polynucleotide the term also can encompass any allelic variant of the SNCA-encoding genomic DNA which is found at Chromosomal position 17q21 by chromosomal translocation or duplication, and the RNA, such as mRNA derived therefrom. “Naturally occurring variants” can also include variants derived from alternative splicing of the SNCA mRNA. When referenced to a specific polypeptide sequence, e.g., the term also includes naturally occurring forms of the protein, which can therefore be processed, e.g., by co- or post-translational modifications, such as signal peptide cleavage, proteolytic cleavage, glycosylation, etc.

[0053] In determining the degree of “complementarity” between ASOs of the disclosure (or regions thereof) and the target region of the nucleic acid which encodes mammalian SNCA protein (e.g., the SNCA gene), such as those disclosed herein, the degree of “complementarity” (also, “homology” or “identity”) is expressed as the percentage identity (or percentage homology) between the sequence of the ASO (or region thereof) and the sequence of the target region (or the reverse complement of the target region) that best aligns therewith. The percentage is calculated by counting the number of aligned bases that are identical between the two sequences, dividing by the total number of contiguous monomers in the ASO, and multiplying by 100. In such a comparison, if gaps exist, it is preferable that such gaps are merely mismatches rather than areas where the number of monomers within the gap differs between the ASO of the disclosure and the target region.

[0054] The term “complement” as used herein indicates a sequence that is complementary to a reference sequence. It is well known that complementarity is the base principle of DNA replication and transcription as it is a property shared between two DNA or RNA sequences, such that when they are aligned antiparallel to each other, the nucleotide bases at each position in the sequences will be complementary, much like looking in the mirror and seeing the reverse of things. Therefore, for example, the complement of a sequence of 5′“ATGC”3′ can be written as 3′“TACG”5′ or 5′“GCAT”3′. The terms “reverse complement”, “reverse complementary” and “reverse complementarity” as used herein are interchangeable with the terms “complement”, “complementary” and “complementarity.”

[0055] The term “% complementary” as used herein, refers to the proportion of nucleotides (in percent) of a contiguous nucleotide sequence in a nucleic acid molecule (e.g. oligonucleotide) which across the contiguous nucleotide sequence, are complementary to a reference sequence (e.g. a target sequence or sequence motif). The percentage of complementarity is thus calculated by counting the number of aligned nucleobases that are complementary (from Watson Crick base pair) between the two sequences (when aligned with the target sequence 5′-3′ and the oligonucleotide sequence from 3′-5′), dividing that number by the total number of nucleotides in the oligonucleotide and multiplying by 100. In such a comparison a nucleobase/nucleotide which does not align (form a base pair) is termed a mismatch. Insertions and deletions are not allowed in the calculation of % complementarity of a contiguous nucleotide sequence. It will be understood that in determining complementarity, chemical modifications of the nucleobases are disregarded as long as the functional capacity of the nucleobase to form Watson Crick base pairing is retained (e.g. 5′-methyl cytosine is considered identical to a cytosine for the purpose of calculating % identity).

[0056] The term “fully complementary”, refers to 100% complementarity.

[0057] The terms “corresponding to” and “corresponds to,” when referencing two separate nucleic acid or nucleotide sequences can be used to clarify regions of the sequences that correspond or are similar to each other based on homology and/or functionality, although the nucleotides of the specific sequences can be numbered differently. For example, different isoforms of a gene transcript can have similar or conserved portions of nucleotide sequences whose numbering can differ in the respective isoforms based on alternative splicing and/or other modifications. In addition, it is recognized that different numbering systems can be employed when characterizing a nucleic acid or nucleotide sequence (e.g., a gene transcript and whether to begin numbering the sequence from the translation start codon or to include the 5′UTR). Further, it is recognized that the nucleic acid or nucleotide sequence of different variants of a gene or gene transcript can vary. As used herein, however, the regions of the variants that share nucleic acid or nucleotide sequence homology and/or functionality are deemed to “correspond” to one another. For example, a nucleotide sequence of a SNCA transcript corresponding to nucleotides X to Y of SEQ ID NO: 1 (“reference sequence”) refers to an SNCA transcript sequence (e.g., SNCA pre-mRNA or mRNA) that has an identical sequence or a similar sequence to nucleotides X to Y of SEQ ID NO: 1. A person of ordinary skill in the art can identify the corresponding X and Y residues in the SNCA transcript sequence by aligning the SNCA transcript sequence with SEQ ID NO: 1.

[0058] The terms “corresponding nucleotide analogue” and “corresponding nucleotide” are intended to indicate that the nucleobase in the nucleotide analogue and the naturally occurring nucleotide have the same pairing, or hybridizing, ability. For example, when the 2-deoxyribose unit of the nucleotide is linked to an adenine, the “corresponding nucleotide analogue” contains a pentose unit (different from 2-deoxyribose) linked to an adenine.

[0059] The term “DES Number” or “DES No.” as used herein refers to a unique number given to a nucleotide sequence having a specific pattern of nucleosides (e.g., DNA) and nucleoside analogues (e.g., LNA). As used herein, the design of an ASO is shown by a combination of upper case letters and lower case letters. For example, DES-003092 refers to an ASO sequence of ctaacaacttctgaacaaca (SEQ ID NO: 1436) with an ASO design of LDDLLDDDDDDDDDDLDLLL (i.e., CtaACaacttctgaaCaACA), wherein the L (i.e., upper case letter) indicates a nucleoside analogue (e.g., LNA) and the D (i.e., lower case letter) indicates a nucleoside (e.g., DNA).

[0060] The term “ASO Number” or “ASO No.” as used herein refers to a unique number given to a nucleotide sequence having the detailed chemical structure of the components, e.g., nucleosides (e.g., DNA), nucleoside analogues (e.g., beta-D-oxy-LNA), nucleobase (e.g., A, T, G, C, U, or MC), and backbone structure (e.g., phosphorothioate or phosphorodiester). For example, ASO-003092 refers to OxyMCs DNAts DNAas OxyAs OxyMCs DNAas DNAas DNAcs DNAts DNAts DNAcs DNAts DNAgs DNAas DNAas OxyMCs DNAas OxyAs OxyMCs OxyA.

[0061] “Potency” is normally expressed as an IC₅₀ or EC₅₀ value, in μM, nM, or pM unless otherwise stated. Potency can also be expressed in terms of percent inhibition. IC₅₀ is the median inhibitory concentration of a therapeutic molecule. EC₅₀ is the median effective concentration of a therapeutic molecule relative to a vehicle or control (e.g., saline). In functional assays, IC₅₀ is the concentration of a therapeutic molecule that reduces a biological response, e.g., transcription of mRNA or protein expression, by 50% of the biological response that is achieved by the therapeutic molecule. In functional assays, EC₅₀ is the concentration of a therapeutic molecule that produces 50% of the biological response, e.g., transcription of mRNA or protein expression. IC₅₀ or EC₅₀ can be calculated by any number of means known in the art.

[0062] By “subject” or “individual” or “animal” or “patient” or “mammal,” is meant any subject, particularly a mammalian subject, for whom diagnosis, prognosis, or therapy is desired. Mammalian subjects include humans, domestic animals, farm animals, sports animals, and zoo animals including, e.g., humans, non-human primates, dogs, cats, guinea pigs, rabbits, rats, mice, horses, cattle, bears, and so on.

[0063] The term “pharmaceutical composition” refers to a preparation which is in such form as to permit the biological activity of the active ingredient to be effective, and which contains no additional components which are unacceptably toxic to a subject to which the composition would be administered. Such composition can be sterile.

[0064] An “effective amount” of an ASO as disclosed herein is an amount sufficient to carry out a specifically stated purpose. An “effective amount” can be determined empirically and in a routine manner, in relation to the stated purpose.

[0065] Terms such as “treating” or “treatment” or “to treat” or “alleviating” or “to alleviate” refer to both (1) therapeutic measures that cure, slow down, lessen symptoms of, and/or halt progression of a diagnosed pathologic condition or disorder and (2) prophylactic or preventative measures that prevent and/or slow the development of a targeted pathologic condition or disorder. Thus, those in need of treatment include those already with the disorder; those prone to have the disorder; and those in whom the disorder is to be prevented. In certain embodiments, a subject is successfully “treated” for a disease or condition disclosed elsewhere herein according to the methods provided herein if the patient shows, e.g., total, partial, or transient alleviation or elimination of symptoms associated with the disease or disorder.

### II. Antisense Oligonucleotides

[0066] The present disclosure employs antisense oligonucleotides for use in modulating the function of nucleic acid molecules encoding mammalian α-Syn, such as the SNCA nucleic acid, e.g., SNCA transcript, including SNCA pre-mRNA, and SNCA mRNA, or naturally occurring variants of such nucleic acid molecules encoding mammalian α-Syn. The term “ASO” in the context of the present disclosure, refers to a molecule formed by covalent linkage of two or more nucleotides (i.e., an oligonucleotide).

[0067] The ASO comprises a contiguous nucleotide sequence of from about 10 to about 30, such as 10-20, 16-20, or 15-25 nucleotides in length. The terms “antisense ASO,” “antisense oligonucleotide,” and “oligomer” as used herein are interchangeable with the term “ASO.”

[0068] A reference to a SEQ ID number includes a particular nucleobase sequence, but does not include any design or full chemical structure shown in FIG. 1A to C or 2. Furthermore, the ASOs disclosed in the figures herein show a representative design, but are not limited to the specific design shown in the figures unless otherwise indicated. Herein, a single nucleotide (unit) can also be referred to as a monomer or unit. When this specification refers to a specific ASO number, the reference includes the sequence, the specific ASO design, and the chemical structure. When this specification refers to a specific DES number, the reference includes the sequence and the specific ASO design. For example, when a claim (or this specification) refers to SEQ ID NO: 1436, it includes the nucleotide sequence of ctaacaacttctgaacaaca only. When a claim (or the specification) refers to DES-003092, it includes the nucleotide sequence of ctaacaacttctgaacaaca with the ASO design shown in the figures (i.e., CtaACaacttctgaaCaACA). Alternatively, the design of ASO-003092 can also be written as SEQ ID NO: 1436, wherein each of the 1^{st} nucleotide, 4^{th} nucleotide, 5^{th} nucleotide, 16^{th} nucleotide and 18^{th}-20^{th} nucleotides from the 5′ end is a modified nucleotide, e.g., LNA, and each of the other nucleotides is a non-modified nucleotide (e.g., DNA). The ASO number includes the sequence and the ASO design as well as the specific details of the ASO. Therefore, ASO-003092 referred in this application indicates OxyMCs DNAts DNAas OxyAs OxyMCs DNAas DNAas DNAcs DNAts DNAts DNAcs DNAts DNAgs DNAas DNAas OxyMCs DNAas OxyAs OxyMCs OxyA, wherein “s” indicates a phosphorothioate linkage.

[0069] In various embodiments, the ASO of the disclosure does not comprise RNA (units). In some embodiments, the ASO comprises one or more DNA units. In one embodiment, the ASO according to the disclosure is a linear molecule or is synthesized as a linear molecule. In some embodiments, the ASO is a single stranded molecule, and does not comprise short regions of, for example, at least 3, 4 or 5 contiguous nucleotides, which are complementary to equivalent regions within the same ASO (i.e. duplexes) —in this regard, the ASO is not (essentially) double stranded. In some embodiments, the ASO is essentially not double stranded. In some embodiments, the ASO is not a siRNA. In various embodiments, the ASO of the disclosure can consist entirely of the contiguous nucleotide region. Thus, in some embodiments the ASO is not substantially self-complementary.

[0070] In one embodiment, the ASO of the disclosure can be in the form of any pharmaceutically acceptable salts. The term “pharmaceutically acceptable salts” as used herein refers to derivatives of the ASOs of the disclosure wherein the ASO is modified (e.g., addition of a cation) by making salts thereof. Such salts retain the desired biological activity of the ASOs without imparting undesired toxicological effects. In some embodiments, the ASO of the disclosure is in the form of a sodium salt. In other embodiments, the ASO is in the form of a potassium salt.

### II.A. The Target

[0071] Suitably the ASO of the disclosure is capable of down-regulating (e.g., reducing or removing) expression of the SNCA mRNA or SNCA protein. In this regard, the ASO of the disclosure can affect indirect inhibition of SNCA protein through the reduction in SNCA mRNA levels, typically in a mammalian cell, such as a human cell, such as a neuronal cell. In particular, the present disclosure is directed to ASOs that target one or more regions of the SNCA pre-mRNA.

[0072] Synonyms of SNCA are known and include NACP, non A-beta component of AD amyloid, PARK1, PARK4, and PD1. The sequence for the SNCA gene can be found under publicly available Accession Number NC_000004.12 and the sequence for the SNCA pre-mRNA transcript can be found under publicly available Accession Number NG_011851.1 (SEQ ID NO: 1). The sequence for SNCA protein can be found under publicly available Accession Numbers: P37840, A8K2A4, Q13701, Q4JHI3, and Q61AU6, each of which is incorporated by reference herein in its entirety. Natural variants of the SNCA gene product are known. For example, natural variants of SNCA protein can contain one or more amino acid substitutions selected from: A30P, E46K, H50Q, A53T, and any combinations thereof. Therefore, the ASOs of the present disclosure can be designed to reduce or inhibit expression of the natural variants of the SNCA protein.

[0073] Mutations in SNCA are known to cause one or more pathological conditions. The ASOs of the disclosure can be used to reduce or inhibit the expression of a SNP or alternatively spliced SNCA transcript containing one or more mutations and consequently reduce the formation of a mutated SNCA protein. Examples of SNCA protein mutants include, but are not limited to a SNCA protein comprising one or more mutations selected from: D2A, E35K, Y39F, H50A, E57K, G67_V71del, V71_V82del, A76_V77del, A76del, V77del, A78del, A85_F94del, Y125F, Y133F, Y136F, and any combination thereof. The ASO of the disclosure can be designed to reduce or inhibit expression of any mutants of SNCA proteins.

[0074] An example of a target nucleic acid sequence of the ASOs is SNCA pre-mRNA. SEQ ID NO: 1 represents a SNCA genomic sequence. SEQ ID NO: 1 is identical to a SNCA pre-mRNA sequence except that the nucleotide “t” in SEQ ID NO: 1 is shown as “u” in the pre-mRNA. In certain embodiments, the “target nucleic acid” comprises an intron region of an SNCA protein-encoding nucleic acids or naturally occurring variants thereof, and RNA nucleic acids derived therefrom, e.g., pre-mRNA. In other embodiments, the “target nucleic acid” comprises an exon region of an SNCA protein-encoding nucleic acids or naturally occurring variants thereof, and RNA nucleic acids derived therefrom, such as a mRNA, pre-mRNA, or a mature mRNA. In some embodiments, for example when used in research or diagnostics the “target nucleic acid” can be a cDNA or a synthetic oligonucleotide derived from the above DNA or RNA nucleic acid targets. In one embodiment, the SNCA genomic sequence is shown as GenBank Accession No. NG_011851.1 (SEQ ID NO: 1). The mature mRNA encoding SNCA protein is shown as SEQ ID NO: 2 (NM_000345.3) Variants of this sequence are shown in SEQ ID NO: 3 (NM_001146054.1) SEQ ID NO: 4 (NM_001146055.1), and SEQ ID NO: 5 (NM_007308.2), variants 2-4, respectively. Variant 2 corresponds to GenBank Accession No. NM_001146054.1. Variant 3 corresponds to GenBank Accession No. NM_001146055.1. Variant 4 corresponds to GenBank Accession No. NM_007308.2. The SNCA protein sequence encoded by the SNCA mRNA (SEQ ID NO: 2) is shown as SEQ ID NO: 6.

[0075] The target nucleic acid sequences to which the oligonucleotides of the invention are complemental are summarized in the table below:

| | | Length | SEQ | | |
|---|---|---|---|---|---|
| Species | type | (nt) | ID NO | NCBI ref. | Alternative name/comments |
| Human | premRNA | 121198 | 1 | NG_011851.1 | Human (GRCh38.p12) |
| | | | | | Chromosome 4: |
| | | | | | position 89,724,099-89,838,315 |
| | | | | | reverse strand |
| Human | mRNA | 3215 | 2 | NM_000345.3 | Transcript of SEQ ID NO: 1 |
| Human | mRNA | 3211 | 3 | NM_001146054.1 | Variant 2 |
| Human | mRNA | 3022 | 4 | NM_001146055.1 | Variant 3 |
| Human | mRNA | 3127 | 5 | NM_007308.2 | Variant 4 |

[0076] The oligonucleotide of the invention may for example target an exon region of a mammalian SNCA, or may for example target an intron region in the SNCA pre-mRNA as indicated in the table below:

| Exonic regions in the human | | | Intronic regions in the human | | |
|---|---|---|---|---|---|
| SNCA premRNA (SEQ ID NO 1) | | | SNCA premRNA (SEQ ID NO 1) | | |
| ID | start | end | ID | start | end |
| | | | i0 | 1 | 6097 |
| e1 | 6098 | 6335 | i1 | 6336 | 7604 |
| e2 | 7605 | 7750 | i2 | 7751 | 15112 |
| e3 | 15113 | 15154 | i3 | 15155 | 20908 |
| e4 | 20909 | 21051 | i4 | 21052 | 114019 |
| e5 | 114020 | 114103 | i5 | 114104 | 116636 |
| e6 | 116637 | 119198 | i6 | 119199 | 121198 |

[0077] In one embodiment, the ASO according to the disclosure comprises a contiguous nucleotide sequence of 10 to 30 nucleotides in length that are complementary to a nucleic acid sequence within a SNCA transcript, e.g., a region corresponding to an exon, intron, or any combination thereof of SEQ ID NO: 1 or a region within SEQ ID NOs: 2, 3, 4, or 5, wherein the nucleic acid sequence corresponds to (i) nucleotides 4942-5343 of SEQ ID NO: 1; (ii) nucleotides 6326-7041 of SEQ ID NO: 1; (iia) nucleotides 6336-7041 of SEQ ID NO: 1; (iii) nucleotides 7329-7600 of SEQ ID NO: 1; (iv) nucleotides 7630-7783 of SEQ ID NO: 1; (iva) nucleotides 7750-7783 of SEQ ID NO: 1; (v) nucleotides 8277-8501 of SEQ ID NO: 1; (vi) nucleotides 9034-9526 of SEQ ID NO: 1; (vii) nucleotides 9982-14279 of SEQ ID NO: 1; (viii) nucleotides 15204-19041 of SEQ ID NO: 1; (ix) nucleotides 20351-29654 of SEQ ID NO: 1; (ixa) nucleotides 20351-20908 of SEQ ID NO: 1; (ixb) nucleotides 21052-29654 of SEQ ID NO: 1; (x) nucleotides 30931-33938 of SEQ ID NO: 1; (xi) nucleotides 34932-37077 of SEQ ID NO: 1; (xii) nucleotides 38081-42869 of SEQ ID NO: 1; (xiii) nucleotides 44640-44861 of SEQ ID NO: 1; (xiv) nucleotides 46173-46920 of SEQ ID NO: 1; (xv) nucleotides 47924-58752 of SEQ ID NO: 1; (xvi) nucleotides 60678-60905 of SEQ ID NO: 1; (xvii) nucleotides 62066-62397 of SEQ ID NO: 1; (xviii) nucleotides 67759-71625 of SEQ ID NO: 1; (xix) nucleotides 72926-86991 of SEQ ID NO: 1; (xx) nucleotides 88168-93783 of SEQ ID NO: 1; (xxi) nucleotides 94976-102573 of SEQ ID NO: 1; (xxii) nucleotides 104920-107438 of SEQ ID NO: 1; (xxiii) nucleotides 108948-119285 of SEQ ID NO: 1; (xxiiia) nucleotides 108948-114019 of SEQ ID NO: 1; (xxiib) nucleotides 114292-116636 of SEQ ID NO: 1; (xxiv) nucleotides 131-678 of SEQ ID NO: 5; (xxv) nucleotides 131-348 of SEQ ID NO: 3; (xxvi) nucleotides 1-162 of SEQ ID NO: 4; (xxvii) nucleotides 126-352 of SEQ ID NO: 2; (xxviii) nucleotides 276-537 of SEQ ID NO: 2; (xxix) nucleotides 461-681 of SEQ ID NO: 2; and (xxx) nucleotides 541-766 of SEQ ID NO: 2.

[0078] In another embodiment, the ASO according to the disclosure comprises a contiguous nucleotide sequence of 10-30 nucleotides that hybridizes to or is complementary, such as at least 90% complementary, such as fully complementary, to a region within an intron of a SNCA transcript, e.g., a region corresponding to an intron of SEQ ID NO: 1 (e.g., intron 1, 2, 3, or 4).

[0079] In some embodiments the ASO comprises a contiguous nucleotide sequence of 10 to 30 nucleotides in length that is at least 90% complementary, such as fully complementary, to an intron region present in the pre-mRNA of human SNCA, selected from intron i0 (nucleotides 1-6097 of SEQ ID NO: 1); i1 (nucleotides 6336-7604 of SEQ ID NO: 1); i2 (nucleotides 7751-15112 of SEQ ID NO: 1); i3 (nucleotides 15155-20908 of SEQ ID NO: 1); i4 (nucleotides 21052-114019 of SEQ ID NO: 1); i5 (nucleotides 114104-116636 of SEQ ID NO: 1) or i6 (nucleotides 119199-121198 of SEQ ID NO: 1).

[0080] In some embodiments the ASO comprises a contiguous nucleotide sequence of 10 to 30 nucleotides in length that is at least 90% complementary, such as fully complementary to a of human SNCA, wherein the nucleic acid sequence corresponds to nucleotides 21052-20351-29654 of SEQ ID NO: 1; nucleotides 30931-33938 of SEQ ID NO: 1; nucleotides 44640-44861 of SEQ ID NO: 1; or nucleotides 47924-58752 of SEQ ID NO: 1.

[0081] In particular, an ASO complementary to intron 4 (nucleotides 21052-114019 of SEQ ID NO: 1), such as intron 4 regions selected from nucleotides 21052-29654 of SEQ ID NO: 1; nucleotides 24483-28791 of SEQ ID NO: 1; nucleotides 30931-33938 of SEQ ID NO: 1; nucleotides 32226-32242 of SEQ ID NO: 1; nucleotides 44640-44861 of SEQ ID NO: 1; nucleotides 44741-44758 of SEQ ID NO: 1; nucleotides 47924-58752 of SEQ ID NO: 1 or nucleotides 48641-48659 of SEQ ID NO: 1 are advantageous.

[0082] In another embodiment, the ASO of the disclosure comprises a contiguous nucleotide sequence of 10-30 nucleotides that hybridizes to or is complementary, such as at least 90% complementary, such as fully complementary, to a nucleic acid sequence, or a region within the sequence, of a SNCA transcript, wherein the nucleic acid sequence corresponds to nucleotides 6,426-6,825; 18,569-20,555; or 31,398-107,220 of SEQ ID NO: 1, and wherein the ASO has one of the designs described herein (e.g., Section II.G. e.g., a gapmer design, e.g., an alternating flank gapmer design) or a chemical structure shown elsewhere herein (e.g., FIGS. 1A to 1C and 2).

[0083] In another embodiment, the target region corresponds to nucleotides 5,042-5,243 of SEQ ID NO: 1.

[0084] In other embodiments, the target region corresponds to nucleotides 6336-7604 of SEQ ID NO: 1.

[0085] In other embodiments, the target region corresponds to nucleotides 6336-7041 of SEQ ID NO: 1

[0086] In other embodiments, the target region corresponds to nucleotides 6,426-6,941 of SEQ ID NO: 1.

[0087] In some embodiments, the target region corresponds to nucleotides 7,429-7,600 of SEQ ID NO: 1.

[0088] In some embodiments, the target region corresponds to nucleotides 7,630-7,683 of SEQ ID NO: 1.

[0089] In other embodiments, the target region corresponds to nucleotides 7751-15112 of SEQ ID NO: 1.

[0090] In other embodiments, the target region corresponds to nucleotides 7751-7783 of SEQ ID NO: 1.

[0091] In one embodiment, the target region corresponds to nucleotides 8,377-8,401 of SEQ ID NO: 1.

[0092] In another embodiment, the target region corresponds to nucleotides 9,134-9,426 of SEQ ID NO: 1.

[0093] In one embodiment, the target region corresponds to nucleotides 10,082-14,179 of SEQ ID NO: 1.

[0094] In one embodiment, the target region corresponds to nucleotides 15,304-18,941 of SEQ ID NO: 1.

[0095] In one embodiment, the target region corresponds to nucleotides 15155-20908 of SEQ ID NO: 1.

[0096] In one embodiment, the target region corresponds to nucleotides 20,451-29,554 of SEQ ID NO: 1.

[0097] In one embodiment, the target region corresponds to nucleotides 20351-20908 of SEQ ID NO: 1.

[0098] In one embodiment, the target region corresponds to nucleotides 21052-114019 of SEQ ID NO: 1.

[0099] In one embodiment, the target region corresponds to nucleotides 21052-29654 of SEQ ID NO: 1

[0100] In one embodiment, the target region corresponds to nucleotides 31,031-33,838 of SEQ ID NO: 1.

[0101] In one embodiment, the target region corresponds to nucleotides 30931-33938 of SEQ ID NO: 1.

[0102] In some embodiments, the target region corresponds to nucleotides 35032-36977 of SEQ ID NO: 1.

[0103] In some embodiments, the target region corresponds to nucleotides 38181-42769 of SEQ ID NO: 1.

[0104] In one embodiment, the target region corresponds to nucleotides 44640-44861 of SEQ ID NO: 1.

[0105] In one embodiment, the target region corresponds to nucleotides 44740-44761 of SEQ ID NO: 1.

[0106] In some embodiments, the target region corresponds to nucleotides 46273-46820 of SEQ ID NO: 1.

[0107] In one embodiment, the target region corresponds to nucleotides 47924-58752 of SEQ ID NO: 1.

[0108] In other embodiments, the target region corresponds to nucleotides 48024-58752 of SEQ ID NO: 1.

[0109] In some embodiments, the target region corresponds to nucleotides 60778-60805 of SEQ ID NO: 1.

[0110] In some embodiment, the target region corresponds to nucleotides 62,166-62,297 of SEQ ID NO: 1.

[0111] In one embodiment, the target region corresponds to nucleotides 67,859-71,525 of SEQ ID NO: 1.

[0112] In some embodiments, the target region corresponds to nucleotides 73026-86891 of SEQ ID NO: 1.

[0113] In some embodiments, the target region corresponds to nucleotides 88268-93683 of SEQ ID NO: 1.

[0114] In some embodiment, the target region corresponds to nucleotides 95076-102473 of SEQ ID NO: 1.

[0115] In some embodiments, the target region corresponds to nucleotides 105020-107338 of SEQ ID NO: 1.

[0116] In some embodiments, the target region corresponds to nucleotides 109,048-119,185 of SEQ ID NO: 1.

[0117] In some embodiments, the target region corresponds to nucleotides 108948-114019 of SEQ ID NO: 1.

[0118] In some embodiments, the target region corresponds to nucleotides nucleotides 114292-116636 of SEQ ID NO: 1.

[0119] In one embodiment, the target region corresponds to nucleotides 231-248 or 563-578 of SEQ ID NO: 5.

[0120] In another embodiment, the target region corresponds to nucleotides 231-248 of SEQ ID NO: 3.

[0121] In some embodiments, the target region corresponds to nucleotides 38-62 of SEQ ID NO: 4.

[0122] In other embodiments, the target region corresponds to nucleotides 226-252 of SEQ ID NO: 2.

[0123] In one embodiment, the target region corresponds to nucleotides 376-437 of SEQ ID NO: 2.

[0124] In another embodiment, the target region corresponds to nucleotides 561-581 of SEQ ID NO: 2.

[0125] In one embodiment, the target region corresponds to nucleotides 641-666 of SEQ ID NO: 2.

[0126] In certain embodiments, the ASOs hybridize to or are complementary, such as at least 90% complementary, such as fully complementary, to a region within a SNCA transcript, e.g., SEQ ID NO: 1, and have a sequence score equal to or greater than about 0.1, 0.2, 0.3, 0.4, 0.5, 0.6, 0.7, 0.8, 0.9, or 1.0. Calculation methods of the sequence score are disclosed elsewhere herein.

[0127] In one embodiment, the ASO according to the disclosure comprises a contiguous nucleotide sequence that hybridizes to a region within an exon of a SNCA transcript, e.g., a region corresponding to an exon of SEQ ID NO: 1, e.g., exon 2, 4, 5, or 6. In another embodiment, the ASO of the disclosure comprises a contiguous nucleotide sequence that hybridizes to a nucleic acid sequence, or a region within the sequence, of a SNCA transcript (“target region”), wherein the nucleic acid sequence corresponds to nucleotides 7,630-7,683; 20,932-21,032; 114, 059-114,098; or 116,659-119,185 of SEQ ID NO: 1. In another embodiment, the ASO of the disclosure comprises a contiguous nucleotide sequence that hybridizes to a nucleic acid sequence, or a region within the sequence, of a SNCA transcript, wherein the nucleic acid sequence corresponds to nucleotides 7,630-7,683; 20,926-21,032; 114, 059-114,098; or 116,659-119,185 of SEQ ID NO: 1, and wherein the ASO has one of the designs described herein (e.g., Section II.G. e.g., a gapmer design, e.g., an alternating flank gapmer design) or a chemical structure shown elsewhere herein (e.g., FIGS. 1A to 1C and 2).

[0128] In another embodiment, the target region corresponds to nucleotides 7,630-7,683 of SEQ ID NO: 1. In some embodiments, the target region corresponds to nucleotides 20,932-21,032 of SEQ ID NO: 1. In certain embodiments, the target region corresponds to nucleotides 114,059-114,098 of SEQ ID NO: 1. In one embodiment, the target region corresponds to nucleotides 116,659-119,185 of SEQ ID NO: 1. In another embodiment, the target region corresponds to nucleotides 116,981-117,212 of SEQ ID NO: 1. In some embodiments, the target region corresponds to nucleotides 116,981-117,019 of SEQ ID NO: 1. In other embodiments, the target region corresponds to nucleotides 117,068-117,098 of SEQ ID NO: 1. In certain embodiments, the target region corresponds to nucleotides 117,185-117,212 of SEQ ID NO: 1. In another embodiment, the target region corresponds to nucleotides 118,706-118,725 of SEQ ID NO: 1. In certain embodiments, the ASOs hybridize to a region within an exon of a SNCA transcript, e.g., SEQ ID NO: 1, and have a sequence score equal to or greater than about 0.1, 0.2, 0.3, 0.4, 0.5, 0.6, 0.7, 0.8, 0.9, or 1.0. Calculation methods of the sequence score are disclosed elsewhere herein.

[0129] In other embodiments, the target region corresponds to nucleotides 6,426-6,825 of SEQ ID NO: 1±10, ±20, ±30, ±40, ±50, ±60, ±70, ±80, or ±90 nucleotides at the 3′ end, the 5′ end, or both. In some embodiments, the target region corresponds to nucleotides 18,569-20,555 of SEQ ID NO: 1±10, ±20, ±30, ±40, ±50, ±60, ±70, ±80, or ±90 nucleotides at the 3′ end, the 5′ end, or both. In another embodiment, the target region corresponds to nucleotides 20,926-21,032 of SEQ ID NO: 1±10, ±20, ±30, ±40, ±50, ±60, ±70, ±80 or ±90 nucleotides at the 3′ end, the 5′ end, or both. In other embodiments, the target region corresponds to nucleotides 31,398-31,413 of SEQ ID NO: 1±10, ±20, ±30, ±40, ±50, ±60, ±70, ±80, or ±90 nucleotides at the 3′ end, the 5′ end, or both. In some embodiments, the target region corresponds to nucleotides 35,032-35,049 of SEQ ID NO: 1±10, ±20, ±30, ±40, ±50, ±60, ±70, ±80, or ±90 nucleotides at the 3′ end, the 5′ end, or both. In certain embodiments, the target region corresponds to nucleotides 68,373-69,827 of SEQ ID NO: 1±10, ±20, ±30, ±40, ±50, ±60, ±70, ±80, or ±90 nucleotides at the 3′ end, the 5′ end, or both. In another embodiment, the target region corresponds to nucleotides 78,418-78,487 of SEQ ID NO: 1±10, ±20, ±30, ±40, ±50, ±60, ±70, ±80, or ±90 nucleotides at the 3′ end, the 5′ end, or both. In other embodiments, the target region corresponds to nucleotides 91,630-91,646 of SEQ ID NO: 1±10, ±20, ±30, ±40, ±50, ±60, ±70, ±80, or ±90 nucleotides at the 3′ end, the 5′ end, or both. In some embodiments, the target region corresponds to nucleotides 100,028-101,160 of SEQ ID NO: 1±10, ±20, ±30, ±40, ±50, ±60, ±70, ±80, or ±90 nucleotides at the 3′ end, the 5′ end, or both. In certain embodiments, the target region corresponds to nucleotides 107,205-107,220 of SEQ ID NO: 1±10, ±20, ±30, ±40, ±50, ±60, ±70, ±80, or ±90 nucleotides at the 3′ end, the 5′ end, or both. In another embodiment, the target region corresponds to nucleotides 114,059-114,098 of SEQ ID NO: ±10, ±20, ±30, ±40, ±50, ±60, ±70, ±80, or ±90 nucleotides at the 3′ end, the 5′ end, or both. In other embodiments, the target region corresponds to nucleotides 116,659-119,185 of SEQ ID NO: 1±10, ±20, ±30, ±40, ±50, ±60, ±70, ±80, or +90 nucleotides at the 3′ end, the 5′ end, or both. In other embodiments, the target region corresponds to nucleotides 7,604-7,620 of SEQ ID NO: 1±1, ±2, ±3, ±4, ±5, 6, ±7, ±8, or ±9 nucleotides at the 3′ end, the 5′ end, or both.

[0130] In certain embodiments, the ASO of the disclosure is capable of hybridizing to the target nucleic acid (e.g., SNCA transcript) under physiological condition, i.e., in vivo condition. In some embodiments, the ASO of the disclosure is capable of hybridizing to the target nucleic acid (e.g., SNCA transcript) in vitro. In some embodiments, the ASO of the disclosure is capable of hybridizing to the target nucleic acid (e.g., SNCA transcript) in vitro under stringent conditions. Stringency conditions for hybridization in vitro are dependent on, inter alia, productive cell uptake, RNA accessibility, temperature, free energy of association, salt concentration, and time (see, e.g., Stanley T Crooks, Antisense Drug Technology: Principles, Strategies and Applications, 2^{nd} Edition, CRC Press (2007)). Generally, conditions of high to moderate stringency are used for in vitro hybridization to enable hybridization between substantially similar nucleic acids, but not between dissimilar nucleic acids. An example of stringent hybridization conditions include hybridization in 5× saline-sodium citrate (SSC) buffer (0.75 M sodium chloride/0.075 M sodium citrate) for 1 hour at 40° C., followed by washing the sample 10 times in 1×SSC at 40° C. and 5 times in 1×SSC buffer at room temperature. In vivo hybridization conditions consist of intracellular conditions (e.g., physiological pH and intracellular ionic conditions) that govern the hybridization of antisense oligonucleotides with target sequences. In vivo conditions can be mimicked in vitro by relatively low stringency conditions. For example, hybridization can be carried out in vitro in 2×SSC (0.3 M sodium chloride/0.03 M sodium citrate), 0.1% SDS at 37° C. A wash solution containing 4×SSC, 0.1% SDS can be used at 37° C., with a final wash in 1×SSC at 45° C.

### II.B. ASO Sequences

[0131] The ASOs of the disclosure comprise a contiguous nucleotide sequence which corresponds to the complement of a region of SNCA transcript, e.g., a nucleotide sequence corresponding to SEQ ID NO: 1.

[0132] In certain embodiments, the disclosure provides an ASO which comprises a contiguous nucleotide sequence of a total of from 10-30 nucleotides, such as 10-25 nucleotides, such as 16 to 22, such as 10-20 nucleotides, such as 14 to 20 nucleotides, such as 17 to 20 nucleotides, such as 10-15 nucleotides, such as 12-14 nucleotides in length, wherein the contiguous nucleotide sequence has at least about 85%, at least about 90%, at least about 95%, at least about 98%, or at least about 99% sequence identity to a region within the complement of a mammalian SNCA transcript, such as SEQ ID NO: 1 or SEQ ID NO: 2 or naturally occurring variant thereof (SEQ ID NO: 3, 4, or 5). Thus, for example, the ASO hybridizes to a single stranded nucleic acid molecule having the sequence of SEQ ID NOs: 1 to 5 or a portion thereof.

[0133] In some embodiments, the oligonucleotide comprises a contiguous sequence of 10 to 30 nucleotides such as 10-25 nucleotides, such as 16 to 22, such as 10-20 nucleotides, such as 14 to 20 nucleotides, such as 17 to 20 nucleotides, such as 10-15 nucleotides, such as 12-14 nucleotides in length, which is at least 90% complementary, such as at least 91%, such as at least 92%, such as at least 93%, such as at least 94%, such as at least 95%, such as at least 96%, such as at least 97%, such as at least 98%, or 100% complementary with a region of a mammalian SNCA transcript, such as SEQ ID NO: 1, 2, 3, 4 and/or 5.

[0134] The ASO can comprise a contiguous nucleotide sequence which is fully complementary (perfectly complementary) to the equivalent region of a target nucleic acid which encodes a mammalian SNCA protein (e.g., SEQ ID NOs: 1-5). The ASO can comprise a contiguous nucleotide sequence which is fully complementary (perfectly complementary) to a target nucleic acid sequence, or a region within the sequence, such as an intron region, corresponding to nucleotides X-Y of SEQ ID NO: 1, wherein X and Y are the pre-mRNA start site and the pre-mRNA end site of NG_011851.1, respectively. Examples of such regions are listed in section I.A “The Target”. Furthermore, the ASO can have a design described elsewhere herein (e.g., Section II.G. e.g., a gapmer design, e.g., an alternating flank gapmer design) or a chemical structure shown elsewhere herein (e.g., FIGS. 1A to 1C and 2). In some embodiments, the ASO comprises a contiguous nucleotide sequence which is fully complementary (perfectly complementary) to a target nucleic acid sequence, or a region within the sequence, corresponding to nucleotides X-Y of SEQ ID NO: 2, wherein X and Y are the mRNA start site and the mRNA end site, respectively. Examples of such regions are listed in section II.A “The Target”. In other embodiments, the ASO comprises a contiguous nucleotide sequence which is fully complementary (perfectly complementary) to a target nucleic acid sequence, or a region within the sequence, corresponding to nucleotides X-Y of SEQ ID NO: 3, wherein X and Y are the mRNA start site and the mRNA end site, respectively. Examples of such regions are listed in section II.A “The Target”. In other embodiments, the ASO comprises a contiguous nucleotide sequence which is fully complementary (perfectly complementary) to a target nucleic acid sequence, or a region within the sequence, corresponding to nucleotides X-Y of SEQ ID NO: 4, wherein X and Y are the mRNA start site and the mRNA end site, respectively. Examples of such regions are listed in section II.A “The Target”. In other embodiments, the ASO comprises a contiguous nucleotide sequence which is fully complementary (perfectly complementary) to a target nucleic acid sequence, or a region within the sequence, corresponding to nucleotides X-Y of SEQ ID NO: 5, wherein X and Y are the mRNA start site and the mRNA end site, respectively. Examples of such regions are listed in section II.A “The Target”.

[0135] In certain embodiments, the nucleotide sequence of the ASOs of the disclosure or the contiguous nucleotide sequence has at least about 80% sequence identity to a sequence selected from SEQ ID NOs: 7 to 1878 (i.e., the sequences in FIGS. 1A to 1C and 2), such as at least about 85%, at least about 90%, at least about 91%, at least about 92%, at least about 93%, at least about 94%, at least about 95%, at least about 96% sequence identity, at least about 97% sequence identity, at least about 98% sequence identity, at least about 99% sequence identity, such as about 100% sequence identity (homologous). In some embodiments, the ASO has a design described elsewhere herein (e.g., Section II.G.I, e.g., a gapmer design, e.g., an alternating flank gapmer design) or a nucleoside chemical structure shown elsewhere herein (e.g., FIGS. 1A to 1C and 2).

[0136] In certain embodiments, the nucleotide sequence of the ASOs of the disclosure or the contiguous nucleotide sequence has at least about 80% sequence identity to a sequence selected from SEQ ID NO: 7 to SEQ ID NO: 1302 or SEQ ID NO: 1309-1353 such as at least about 85%, at least about 90%, at least about 91%, at least about 92%, at least about 93%, at least about 94%, at least about 95%, at least about 96% sequence identity, at least about 97% sequence identity, at least about 98% sequence identity, at least about 99% sequence identity, such as about 100% sequence identity (homologous). In some embodiments, the ASO has a design described elsewhere herein (e.g., Section II.G.I, e.g., a gapmer design, e.g., an alternating flank gapmer design) or a nucleoside chemical structure shown elsewhere herein (e.g., FIGS. 1A to 1C and 2) In a further embodiment the nucleotide sequence of the ASOs of the disclosure or the contiguous nucleotide sequence consists of a sequence selected from SEQ ID NO: 7 to SEQ ID NO: 1302 or SEQ ID NO: 1309-1353.

[0137] In one embodiment the nucleotide sequence of the ASOs of the disclosure or the contiguous nucleotide sequence comprises or consists of a sequence selected from the group consisting of SEQ ID NO: 276; 278; 296; 295; 325; 328; 326; 329; 330; 327; 332; 333; 331; 339; 341; 390; 522 and 559.

[0138] In some embodiments, the ASO of the disclosure comprises at least one ASO with the design (e.g., DES number) disclosed in FIGS. 1A to 1C and 2. In some embodiments, the ASO of the disclosure comprises at least one ASO with the design (e.g., DES number) disclosed in FIGS. 1A to 1C and 2, wherein the ASO is one nucleotide, two nucleotides, three nucleotides, or four nucleotides shorter at the 3′ end than the ASOs disclosed in FIGS. 1A to 1C and 2. In other embodiments, the ASO of the disclosure comprises at least one ASO with the design (e.g., DES number) disclosed in FIGS. 1A to 1C and 2, wherein the ASO is one nucleotide, two nucleotides, three nucleotides, or four nucleotides shorter at the 5′ end than the ASOs disclosed in FIGS. 1A to 1C and 2. In yet other embodiments, the ASO of the disclosure comprises at least one ASO with the design (e.g., DES number) disclosed in FIGS. 1A to 1C and 2, wherein the ASO is one nucleotide, two nucleotides, three nucleotides, or four nucleotides shorter at the 5′ end and/or the 3′ end than the ASOs disclosed in FIGS. 1A to 1C and 2.

[0139] In one embodiment the contiguous nucleotide sequence comprises or consists a sequence and a design selected from the group consisting of:

(SEQ ID NO: 276)
TTCtctatataacatCACT
(SEQ ID NO: 278)
TTTCtctatataacaTCAC;
(SEQ ID NO: 296)
AACTtttacataccACAT;
(SEQ ID NO: 295)
AACTtttacataccaCATT;
(SEQ ID NO: 325)
ATTAttcatcacaatCCA;
(SEQ ID NO: 328)
ATTAttcatcacaATCC;
(SEQ ID NO: 326)
CattattcatcacaaTCCA;
(SEQ ID NO: 329)
CATtattcatcacaATCC;
(SEQ ID NO: 330)
ACAttattcatcacaaTCC;
(SEQ ID NO: 327)
AcattattcatcacaaTCCA;
(SEQ ID NO: 332)
ACATtattcatcacAATC;
(SEQ ID NO: 333)
TACAttattcatcacAATC;
(SEQ ID NO: 331)
TAcattattcatcacaaTCC;
(SEQ ID NO: 339)
TTCaacatttttatttCACA;
(SEQ ID NO: 341)
ATTCaacatttttattTCAC;
(SEQ ID NO: 390)
ACTAtgatacttcACTC;
(SEQ ID NO: 522)
ACACattaactactCATA
and
(SEQ ID NO: 559)
GTCAaaatattcttaCTT ,

wherein the upper case letters indicate a sugar modified nucleoside analouge and the lower case letters indicate DNAs.

[0140] In other embodiments, the ASO of the disclosure comprises at least one ASO with the chemical structure (e.g., ASO number) disclosed in FIGS. 1A to 1C and 2. In some embodiments, the ASO of the disclosure comprises at least one ASO with the chemical structure (e.g., ASO number) disclosed in FIGS. 1A to 1C and 2, wherein the ASO is one nucleotide, two nucleotides, three nucleotides, or four nucleotides shorter at the 3′ end than the ASOs disclosed in FIGS. 1A to 1C and 2. In other embodiments, the ASO of the disclosure comprises at least one ASO with the chemical structure (e.g., ASO number) disclosed in FIGS. 1A to 1C and 2, wherein the ASO is one nucleotide, two nucleotides, three nucleotides, or four nucleotides shorter at the 5′ end than the ASOs disclosed in FIGS. 1A to 1C and 2. In yet other embodiments, the ASO of the disclosure comprises at least one ASO with the chemical structure (e.g., ASO number) disclosed in FIGS. 1A to 1C and 2, wherein the ASO is one nucleotide, two nucleotides, three nucleotides, or four nucleotides shorter at the 5′ end and/or the 3′ end than the ASOs disclosed in FIGS. 1A to 1C and 2.

[0141] In some embodiments the ASO (or contiguous nucleotide portion thereof) is selected from, or comprises, one of the sequences selected from the group consisting of SEQ ID NOs: 7 to 1878 and a region of at least 10 contiguous nucleotides thereof, wherein the ASO (or contiguous nucleotide portion thereof) can optionally comprise one, two, three, or four mismatches when compared to the corresponding SNCA transcript. It is advantageous if there are with no more than 1 mismatch or no more than 2 mismatches.

[0142] In some embodiments the ASO (or contiguous nucleotide portion thereof) is selected from, or comprises, one of the sequences selected from the group consisting of SEQ ID NO: 7 to SEQ ID NO: 1302 or SEQ ID NO: 1309-1353 and a region of at least 10 contiguous nucleotides thereof, wherein the ASO (or contiguous nucleotide portion thereof) can optionally comprise one, two, three, or four mismatches when compared to the corresponding SNCA transcript. It is advantageous if there are with no more than 1 mismatch or no more than 2 mismatches.

[0143] In one embodiment, the ASO comprises a sequence selected from the group consisting of SEQ ID NO: 1436 (the sequence of ASO-003092) and SEQ ID NO: 1547 (the sequence of ASO-003179)).

[0144] In another embodiment, the ASO comprises a sequence selected from the group consisting of ASO-008387; ASO-008388; ASO-008501; ASO-008502; ASO-008529; ASO-008530; ASO-008531; ASO-008532; ASO-008533; ASO-008534; ASO-008535; ASO-008536; ASO-008537; ASO-008543; ASO-008545; ASO-008584; ASO-008226 and ASO-008261.

[0145] In some embodiments, an ASO of the disclosure binds to the target nucleic acid sequence (e.g., SNCA transcript) and is capable of inhibiting or reducing expression of the SNCA transcript by at least about 10%, at least about 20%, at least about 30%, at least about 40%, at least about 50%, at least about 60%, at least about 70%, at least about 80%, at least about 90%, or about 100% in a tissue (e.g., a brain region) of a mouse expressing a human SNCA gene (e.g., A53T-PAC) when administered in vivo at doses of 3.13 μg, 12.5 μg, 25 μg, 50 μg, or 100 μg compared to the control (e.g., an internal control such as GADPH or tubulin, or a mouse administered with vehicle control alone), as measured by an assay, e.g., quantitative PCR or QUANTIGENE® analysis disclosed herein.

[0146] In some embodiments, an ASO of the disclosure is capable of reducing expression of SNCA protein by at least about 10%, at least about 20%, at least about 30%, at least about 40%, at least about 50%, at least about 60%, at least about 70%, at least about 80%, at least about 90%, or about 100% in a tissue (e.g., a brain region) of a mouse expressing a human SNCA gene (e.g., A53T-PAC) when administered in vivo at doses of 3.13 μg, 12.5 μg, 25 μg, 50 μg, or 100 μg compared to the control (e.g., an internal control such as GADPH or tubulin, or a mouse administered with vehicle control alone), as measured by an assay, e.g., High Content Assay disclosed herein (see Example 2A).

[0147] In some embodiments, an ASO of the disclosure binds to the target nucleic acid sequence (e.g., SNCA transcript) and is capable of inhibiting or reducing expression of the SNCA transcript by at least about 10%, at least about 20%, at least about 30%, at least about 40%, at least about 50%, at least about 60%, at least about 70%, at least about 80%, at least about 90%, or about 100% in a tissue (e.g., a brain region) of a cyno expressing the wild-type SNCA gene when administered once or twice in vivo at doses of 4 mg, 8 mg, or 16 mg compared to the control (e.g., an internal control such as GADPH or tubulin, or a cyno administered with vehicle control alone), as measured by an assay, e.g., quantitative PCR or QUANTIGENE® analysis disclosed herein.

[0148] In some embodiments, an ASO of the disclosure is capable of reducing expression of SNCA protein by at least about 10%, at least about 20%, at least about 30%, at least about 40%, at least about 50%, at least about 60%, at least about 70%, at least about 80%, at least about 90%, or about 100% in a tissue (e.g., a brain region) of a cyno expressing the wild-type SNCA gene when administered once or twice in vivo at doses of 4 mg, 8 mg, or 16 mg compared to the control (e.g., an internal control such as GADPH or tubulin, or a cyno administered with vehicle control alone), as measured by an assay, e.g., High Content Assay disclosed herein (see Example 2A).

[0149] In other embodiments, an ASO of the disclosure is capable of reducing expression of SNCA mRNA in vitro by at least about 20%, at least about 30%, at least about 40%, at least about 50%, at least about 60%, at least about 70%, at least about 80%, at least about 90%, or about 100% in mouse primary neurons expressing a full-length human SNCA gene (e.g., PAC neurons) when the neurons are in contact with 5 μM, 3.3 μM, 1 μM, 4 nM, 40 nM, or 200 nM of the antisense oligonucleotide compared to a control (e.g., an internal control such as GADPH or tubulin, or mouse primary neurons expressing a full-length human SNCA gene in contact with saline alone), as measured by an assay, e.g., QUANTIGENE® analysis disclosed herein.

[0150] In yet other embodiments, an ASO of the disclosure is capable of reducing expression of SNCA protein in vitro by at least about 60%, at least about 70%, at least about 80%, at least about 90%, or at least about 95% in mouse primary neurons expressing a full-length human SNCA gene (e.g., PAC neurons) when the neurons are in contact with 5 μM, 3.3 μM, 1 μM, 4 nM, 40 nM, or 200 nM of the antisense oligonucleotide compared to a control (e.g., an internal control such as GADPH or tubulin, or mouse primary neurons expressing a full-length human SNCA gene in contact with saline alone), as measured by an assay, e.g., High Content Assay disclosed herein (see Example 2A).

[0151] In some embodiments, an ASO of the disclosure is capable of reducing expression of SNCA mRNA in vitro by at least about 10%, at least about 20%, at least about 30%, at least about 40%, at least about 50%, at least about 60%, at least about 70%, at least about 80%, at least about 90%, or about 100% in human neuroblastoma cell line (e.g., SK-N-BE(2)) expressing a full-length human SNCA gene when the neuroblastoma cells are in contact with 25 μM of the antisense oligonucleotide compared to control (e.g., an internal control such as GADPH or tubulin, or neuroblastoma cells expressing a full-length human SNCA gene in contact with saline alone), as measured by an assay, e.g., quantitative PCR disclosed herein.

[0152] In some embodiments, an ASO disclosed herein is capable of reducing expression of SNCA protein in vitro by at least about 10%, at least about 20%, at least about 30%, at least about 40%, at least about 50%, at least about 60%, at least about 70%, at least about 80%, at least about 90%, or about 100% in human neuroblastoma cell line (e.g., SK-N-BE(2)) expressing a full-length human SNCA gene when the neuroblastoma cells are in contact with 25 μM of the antisense oligonucleotide compared to control (e.g., an internal control such as GADPH or tubulin, or neuroblastoma cells expressing a full-length human SNCA gene in contact with saline alone), as measured by an assay, e.g., High Content Assay analysis disclosed herein (see Example 2A).

[0153] In certain embodiments, an ASO of the disclosure binds to the SNCA transcript and inhibit or reduce expression of the SNCA mRNA by at least about 10% or about 20% compared to the normal (i.e. control) expression level in the cell, e.g., at least about 30%, about 40%, about 50%, about 60%, about 70%, about 80%, about 90% or about 95% compared to the normal expression level (such as the expression level in the absence of the ASO(s) or conjugate(s)) in the cell. In certain embodiments, the ASO reduces expression of SNCA protein in a cell following administration of the ASO by at least 60%, at least 70%, at least 80%, or at least 90% compared to a cell not exposed to the ASO (i.e., control). In some embodiments, the ASO reduces expression of SNCA protein in a cell following administration of the ASO by at least about 60%, at least about 70%, at least about 80%, or at least about 90% compared to a cell not exposed to the ASO (i.e., control).

[0154] In certain embodiments, an ASO of the disclosure has at least one property selected from: (1) reduces expression of SNCA mRNA in a cell, compared to a control cell that has not been exposed to the ASO; (2) does not significantly reduce calcium oscillations in a cell; (3) does not significantly reduce tubulin intensity in a cell; (4) reduces expression of α-Syn protein in a cell; and (5) any combinations thereof compared to a control cell that has not been exposed to the ASO.

[0155] In some embodiments, the ASO of the disclosure does not significantly reduce calcium oscillations in a cell, e.g., neuronal cells. If the ASO does not significantly reduce calcium oscillations in a cell, this property of the ASO corresponds with a reduced neurotoxicity of the ASO. In some embodiments, calcium oscillations are greater than or equal to 95%, greater than or equal to 90%, greater than or equal to 85%, greater than or equal to 80%, greater than or equal to 75%, greater than or equal to 70%, greater than or equal to 65%, greater than or equal to 60%, greater than or equal to 55%, or greater than or equal to 50% of oscillations in a cell not exposed to the ASO.

[0156] Calcium oscillations are important for the proper functions of neuronal cells. Networks of cortical neurons have been shown to undergo spontaneous calcium oscillations resulting in the release of the neurotransmitter glutamate. Calcium oscillations can also regulate interactions of neurons with associated glia, in addition to other associated neurons in the network, to release other neurotransmitters in addition to glutamate. Regulated calcium oscillations are required for homeostasis of neuronal networks for normal brain function. (See, Shashank et al., Brain Research, 1006(1): 8-17 (2004); Rose et al., Nature Neurosci., 4:773-774 (2001); Zonta et al., J Physiol Paris., 96(3-4):193-8 (2002); Pasti et al., J. Neurosci., 21(2): 477-484 (2001).) Glutamate also activates two distinct ion channels, α-amino-3-hydroxy-5-methyl-4-isoxazolepropionic acid (AMPA) receptors and N-methyl-D-aspartate (NMDA) receptors.

[0157] In some embodiments, the calcium oscillations measured in the present methods are AMPA-dependent calcium oscillations. In some embodiments, the calcium oscillations are NMDA-dependent calcium oscillations. In some embodiments, the calcium oscillations are gamma-aminobutyric acid (GABA)-dependent calcium oscillations. In some embodiments, the calcium oscillations can be a combination of two or more of AMPA-dependent, NMDA-dependent or GABA-dependent calcium oscillations.

[0158] In certain embodiments, the calcium oscillations measured in the present methods are AMPA-dependent calcium oscillations. In order to measure AMPA-dependent calcium oscillations, the calcium oscillations can be measured in the presence of Mg²⁺ ions (e.g., MgCl₂). In certain embodiments, the method further comprises adding Mg²⁺ ions (e.g., MgCl₂) at an amount that allows for detection of AMPA-dependent calcium oscillations. In some embodiments, the effective ion concentration allowing for detection of AMPA-dependent calcium oscillations is at least about 0.5 mM. In other embodiments, the effective ion concentration to induce AMPA-dependent calcium oscillations is at least about 0.6 mM, at least about 0.7 mM, at least about 0.8 mM, at least about 0.9 mM, at least about 1 mM, at least about 1.5 mM, at least about 2.0 mM, at least about 2.5 mM, at least about 3.0 mM, at least about 4 mM, at least about 5 mM, at least about 6 mM, at least about 7 mM, at least about 8 mM, at least about 9 mM, or at least about 10 mM. In a particular embodiment, the concentration of Mg²⁺ ions (e.g., MgCl₂) useful for the methods is 1 mM. In certain embodiments, the concentration of Mg²⁺ ions (e.g., MgCl₂) useful for the present methods is about 1 mM to about 10 mM, about 1 mM to about 15 mM, about 1 mM to about 20 mM, or about 1 mM to about 25 mM. Mg²⁺ ions can be added by the addition of magnesium salts, such as magnesium carbonate, magnesium chloride, magnesium citrate, magnesium hydroxide, magnesium oxide, magnesium sulfate, and magnesium sulfate heptahydrate.

[0159] In some embodiments, calcium oscillations are measured in the present method through the use of fluorescent probes which detect the fluctuations of intracellular calcium levels. For example, detection of intracellular calcium flux can be achieved by staining the cells with fluorescent dyes which bind to calcium ions (known as fluorescent calcium indicators) with a resultant, detectable change in fluorescence (e.g., Fluo-4 AM and Fura Red AM dyes available from Molecular Probes. Eugene, Oreg., United States of America).

[0160] In other embodiments, the ASO of the disclosure does not significantly reduce the tubulin intensity in a cell. In some embodiments, tubulin intensity is greater than or equal to 95%, greater than or equal to 90%, greater than or equal to 85%, greater than or equal to 80%, greater than or equal to 75%, greater than or equal to 70%, greater than or equal to 65%, greater than or equal to 60%, greater than or equal to 55%, or greater than or equal to 50% of tubulin intensity in a cell not exposed to the ASO (or exposed to saline).

[0161] In some embodiments, such property is observed when using from 0.04 nM to 400 μM concentration of the ASO of the disclosure. In the same or a different embodiment, the inhibition or reduction of expression of SNCA mRNA and/or SNCA protein in the cell results in less than 100%, such as less than 98%, less than 95%, less than 90%, less than 80%, such as less than 70%, mRNA or protein levels compared to cells not exposed to the ASO. Modulation of expression level can be determined by measuring SNCA protein levels, e.g., by methods such as SDS-PAGE followed by western blotting using suitable antibodies raised against the target protein. Alternatively, modulation of expression levels can be determined by measuring levels of SNCA mRNA, e.g., by northern blot or quantitative RT-PCR. When measuring inhibition via mRNA levels, the level of down-regulation when using an appropriate dosage, such as from about 0.04 nM to about 400 μM concentration, is, in some embodiments typically to a level of from about 10-20% the normal levels in the cell in the absence of the ASO.

[0162] In certain embodiments, the ASO of the disclosure has an in vivo tolerability less than or equal to a total score of 4, wherein the total score is the sum of a unit score of five categories, which are 1) hyperactivity; 2) decreased activity and arousal; 3) motor dysfunction and/or ataxia; 4) abnormal posture and breathing; and 5) tremor and/or convulsions, and wherein the unit score for each category is measured on a scale of 0-4. In certain embodiments, the in vivo tolerability is less than or equal to the total score of 3, the total score of 2, the total score of 1, or the total score of 0. In some embodiment, the assessment for in vivo tolerability is determined as described in the examples below.

[0163] In some embodiments, the ASO can tolerate 1, 2, 3, or 4 (or more) mismatches, when hybridizing to the target sequence and still sufficiently bind to the target to show the desired effect, i.e., down-regulation of the target mRNA and/or protein. Mismatches can, for example, be compensated by increased length of the ASO nucleotide sequence and/or an increased number of nucleotide analogues, which are disclosed elsewhere herein.

[0164] In some embodiments, the ASO of the disclosure comprises no more than 3 mismatches when hybridizing to the target sequence. In other embodiments, the contiguous nucleotide sequence comprises no more than 2 mismatches when hybridizing to the target sequence. In other embodiments, the contiguous nucleotide sequence comprises no more than 1 mismatch when hybridizing to the target sequence.

[0165] In some embodiments the ASO according to the disclosure comprises a nucleotide sequence, or a region within the sequence, according to any one of SEQ ID NOs: 7 to 1878, the ASO sequences with the design as described in FIGS. 1A to 1C and 2, and the ASO sequence with the chemical structure as described in FIGS. 1A to 1C and 2.

[0166] However, it is recognized that, in some embodiments, the nucleotide sequence of the ASO can comprise additional 5′ or 3′ nucleotides, such as, 1 to 5, such as 2 to 3 additional nucleotides, such as independently, 1, 2, 3, 4 or 5 additional nucleotides. The additional 5′ and/or 3′ nucleotides are preferably non-complementary to the target sequence. In this respect the ASO of the disclosure, can, in some embodiments, comprise a contiguous nucleotide sequence which is flanked 5′ and/or 3′ by additional nucleotides. In some embodiments the additional 5′ and/or 3′ nucleotides are naturally occurring nucleotides, such as DNA or RNA. In a further embodiment the natural occurring nucleotides at the 5′- or 3′-end are linked with phosphodiester (PO) internucleotide linkages. Such terminal PO linkages are cleavable by nucleases upon entry into the target cell, and are also termed biocleavable linkers and are describe in detail in WO 2014/076195.

[0167] In some embodiments, the ASO of the disclosure has a sequence score greater than or equal to 0.2, wherein the sequence score is calculated by formula I:

$$\frac{\begin{matrix}\# of C nucleotides and analogues thereof - \\ \# of G nucleotides and analogues thereof\end{matrix}}{Total nucleotide length} . \qquad ( I )$$

[0168] In other embodiments, the ASO of the disclosure has a sequence score greater than or equal to 0.2, wherein the sequence score is calculated by formula IA:

$$\frac{\begin{matrix}\# of C nucleotides and \text{5-methylcytosine} nucleotides - \\ \# of G nucleotides\end{matrix}}{Total nucleotide length} . \qquad ( IA )$$

[0169] In these embodiments, a sequence score of greater than or equal to a cut off value corresponds to a reduced neurotoxicity of the ASO.

[0170] In certain embodiments, the ASO of the disclosure has a sequence score greater than or equal to about 0.1, 0.2, 0.25, 0.3, 0.35, 0.4, 0.45, 0.5, 0.55, 0.6, 0.65, 0.7, 0.75, 0.8, 0.85, 0.9, 0.95, or 1.0.

[0171] In one embodiment, the ASO of the disclosure comprises a contiguous nucleotide sequence hybridizing to a non-coding region of a SNCA transcript, wherein the sequence score of the ASO is greater than or equal to about 0.1, 0.2, 0.25, 0.3, 0.35, 0.4, 0.45, 0.5, 0.55, 0.6, 0.65, 0.7, 0.75, 0.8, 0.85, 0.9, 0.95, or 1.0.

[0172] In another embodiment, the ASO of the disclosure comprises a contiguous nucleotide sequence hybridizing to an intron region of a SNCA transcript, wherein the sequence score of the ASO is greater than or equal to about 0.1, 0.2, 0.25, 0.3, 0.35, 0.4, 0.45, 0.5, 0.55, 0.6, 0.65, 0.7, 0.75, 0.8, 0.85, 0.9, 0.95, or 1.0.

[0173] In another embodiment, the ASO of the disclosure comprises a contiguous nucleotide sequence hybridizing to an intron exon junction of a SNCA transcript, wherein the sequence score of the ASO is greater than or equal to about 0.1, 0.2, 0.25, 0.3, 0.35, 0.4, 0.45, 0.5, 0.55, 0.6, 0.65, 0.7, 0.75, 0.8, 0.85, 0.9, 0.95, or 1.0.

[0174] In all of these embodiments, when the sequence score is greater than or equal to the cut off value, the ASO is considered to have reduced neurotoxicity.

### II.C. ASO Length

[0175] The ASOs can comprise a contiguous nucleotide sequence of a total of 10, 11, 12, 13, 14, 15, 16, 17, 18, 19, 20, 21, 22, 23, 24, 25, 26, 27, 28, 29, or 30 contiguous nucleotides in length.

[0176] In some embodiments, the ASOs comprise a contiguous nucleotide sequence of a total of about 10-22, such as 10-21, such as 12-20, such as 15-20, such as 17-20, such as 12-18, such as 13-17 or 12-16, such as 13, 14, 15, 16, 17, 18, 19, 20, or 21 contiguous nucleotides in length.

[0177] In some embodiments, the ASOs comprise a contiguous nucleotide sequence of a total of 10, 11, 12, 13, or 14 contiguous nucleotides in length.

[0178] In some embodiments, the ASOs comprise a contiguous nucleotide sequence of a total of 16, 17, 18, 19 or 20 contiguous nucleotides in length.

[0179] In some embodiments, the ASO according to the disclosure consists of no more than 22 nucleotides, such as no more than 21 or 20 nucleotides, such as no more than 18 nucleotides, such as 15, 16 or 17 nucleotides. In some embodiments the ASO of the disclosure comprises less than 22 nucleotides. It should be understood that when a range is given for an ASO, or contiguous nucleotide sequence length, the range includes the lower and upper lengths provided in the range, for example from (or between) 10-30, includes both 10 and 30.

### II.D. Nucleosides and Nucleoside Analogues

[0180] In one aspect of the disclosure, the ASOs comprise one or more non-naturally occurring nucleotide analogues. “Nucleotide analogues” as used herein are variants of natural nucleotides, such as DNA or RNA nucleotides, by virtue of modifications in the sugar and/or base moieties. Analogues could in principle be merely “silent” or “equivalent” to the natural nucleotides in the context of the oligonucleotide, i.e. have no functional effect on the way the oligonucleotide works to inhibit target gene expression. Such “equivalent” analogues can nevertheless be useful if, for example, they are easier or cheaper to manufacture, or are more stable to storage or manufacturing conditions, or represent a tag or label. In some embodiments, however, the analogues will have a functional effect on the way in which the ASO works to inhibit expression; for example by producing increased binding affinity to the target and/or increased resistance to intracellular nucleases and/or increased ease of transport into the cell. Specific examples of nucleoside analogues are described by e.g. Freier & Altmann; Nucl. Acid Res., 1997, 25, 4429-4443 and Uhlmann; Curr. Opinion in Drug Development, 2000, 3(2), 293-213, and illustrated in section II.D.a and in Scheme 1 (section IID.2b).

### II.D.1. Nucleobase

[0181] The term nucleobase includes the purine (e.g., adenine and guanine) and pyrimidine (e.g., uracil, thymine and cytosine) moiety present in nucleosides and nucleotides which form hydrogen bonds in nucleic acid hybridization. In the context of the present disclosure the term nucleobase also encompasses modified nucleobases which may differ from naturally occurring nucleobases, but are functional during nucleic acid hybridization. In some embodiments the nucleobase moiety is modified by modifying or replacing the nucleobase. In this context “nucleobase” refers to both naturally occurring nucleobases such as adenine, guanine, cytosine, thymidine, uracil, xanthine and hypoxanthine, as well as non-naturally occurring variants. Such variants are for example described in Hirao et al., (2012) Accounts of Chemical Research vol 45 page 2055 and Bergstrom (2009) Current Protocols in Nucleic Acid Chemistry Suppl. 37 1.4.1.

[0182] In some embodiments the nucleobase moiety is modified by changing the purine or pyrimidine into a modified purine or pyrimidine, such as substituted purine or substituted pyrimidine, such as a nucleobase selected from isocytosine, pseudoisocytosine, 5-methyl cytosine, 5-thiozolo-cytosine, 5-propynyl-cytosine, 5-propynyl-uracil, 5-bromouracil 5-thiazolo-uracil, 2-thio-uracil, 2′thio-thymine, inosine, diaminopurine, 6-aminopurine, 2-aminopurine, 2,6-diaminopurine and 2-chloro-6-aminopurine.

[0183] The nucleobase moieties may be indicated by the letter code for each corresponding nucleobase, e.g., A, T, G, C or U, wherein each letter may optionally include modified nucleobases of equivalent function. For example, in the exemplified oligonucleotides, the nucleobase moieties are selected from A, T, G, C, and 5-methyl cytosine. Optionally, for LNA gapmers, 5-methyl cytosine LNA (MC) nucleosides may be used.

### II.D.2. Sugar Modification

[0184] The ASO of the disclosure can comprise one or more nucleosides which have a modified sugar moiety, i.e. a modification of the sugar moiety when compared to the ribose sugar moiety found in DNA and RNA. Numerous nucleosides with modification of the ribose sugar moiety have been made, primarily with the aim of improving certain properties of oligonucleotides, such as affinity and/or nuclease resistance.

[0185] Such modifications include those where the ribose ring structure is modified, e.g. by replacement with a hexose ring (HNA), or a bicyclic ring, which typically have a biradical bridge between the C2′ and C4′ carbons on the ribose ring (LNA), or an unlinked ribose ring which typically lacks a bond between the C2′ and C3′ carbons (e.g., UNA). Other sugar modified nucleosides include, for example, bicyclohexose nucleic acids (WO2011/017521) or tricyclic nucleic acids (WO2013/154798). Modified nucleosides also include nucleosides where the sugar moiety is replaced with a non-sugar moiety, for example in the case of peptide nucleic acids (PNA), or morpholino nucleic acids.

[0186] Sugar modifications also include modifications made via altering the substituent groups on the ribose ring to groups other than hydrogen, or the 2′-OH group naturally found in RNA nucleosides. Substituents may, for example be introduced at the 2′, 3′, 4′ or 5′ positions. Nucleosides with modified sugar moieties also include 2′ modified nucleosides, such as 2′ substituted nucleosides. Indeed, much focus has been spent on developing 2′ substituted nucleosides, and numerous 2′ substituted nucleosides have been found to have beneficial properties when incorporated into oligonucleotides, such as enhanced nucleoside resistance and enhanced affinity.

[0187] In some embodiments, the sugar modification comprises an affinity enhancing sugar modification, e.g., LNA. An affinity enhancing sugar modification increases the binding affinity of the ASOs to the target RNA sequence. In some embodiments, an ASO comprising a sugar modification disclosed herein has a binding affinity to a target RNA sequence that is enhanced by at least 10%, at least 20%, at least 30%, at least 40%, at least 50%, at least 60%, at least 70%, at least 80%, at least 90%, or at least 100% compared to a control (e.g., an ASO without such sugar modification).

### II.D.2.a 2′ Modified Nucleosides

[0188] A 2′ sugar modified nucleoside is a nucleoside which has a substituent other than H or —OH at the 2′ position (2′ substituted nucleoside) or comprises a 2′ linked biradical capable of forming a bridge between the 2′ carbon and a second carbon in the ribose ring, such as LNA (2′-4′ biradical bridged) nucleosides.

[0189] Indeed, much focus has been spent on developing 2′ sugar substituted nucleosides, and numerous 2′ substituted nucleosides have been found to have beneficial properties when incorporated into oligonucleotides. For example, the 2′ modified sugar may provide enhanced binding affinity and/or increased nuclease resistance to the oligonucleotide. Examples of 2′ substituted modified nucleosides are 2′-O-alkyl-RNA, 2′-O-methyl-RNA, 2′-alkoxy-RNA, 2′-O-methoxyethyl-RNA (MOE), 2′-amino-DNA, 2′-Fluoro-RNA, and 2′-F-ANA nucleoside. For further examples, see, e.g., Freier & Altmann; Nucl. Acid Res., 1997, 25, 4429-4443 and Uhlmann; Curr. Opinion in Drug Development, 2000, 3(2), 293-213, and Deleavey and Damha, Chemistry and Biology 2012, 19, 937. Below are illustrations of some 2′ substituted modified nucleosides.

[chemical structure]

[0190] In relation to the present invention 2′ substituted sugar modified nucleosides does not include 2′ bridged nucleosides like LNA.

### II.D.2.b Locked Nucleic Acid Nucleosides (LNA)

[0191] LNA nucleosides are modified nucleosides which comprise a linker group (referred to as a biradical or a bridge) between C2′ and C4′ of the ribose sugar ring of a nucleotide. These nucleosides are also termed bridged nucleic acid or bicyclic nucleic acid (BNA) in the literature.

[0192] In some embodiments, the modified nucleoside or the LNA nucleosides of the ASO of the disclosure has a general structure of the formula II or Ill:

[chemical structure]

wherein W is selected from —O—, —S—, —N(R^{a})—, —C(R^{a}R^{b})—, such as, in some embodiments —O—; B designates a nucleobase or modified nucleobase moiety; Z designates an internucleoside linkage to an adjacent nucleoside, or a 5′-terminal group; Z* designates an internucleoside linkage to an adjacent nucleoside, or a 3′-terminal group; and X designates a group selected from the group consisting of —C(R^{a}R^{b})—, —C(R^{b})═C(R^{b})—, —C(R^{a})═N-, —O—, —Si(R^{a})₂—, —S—, —SO₂—, —N(R^{a})—, and >C═Z.

[0193] In some embodiments, X is selected from the group consisting of: —O—, —S—, NH—, NR^{a}R^{b}, —CH₂—, CR^{a}R^{b}, —C(═CH₂)—, and —C(═CR^{a}R^{b})—. In some embodiments, X is —O—.

[0194] In some embodiments, Y designates a group selected from the group consisting of —C(R^{a}R^{b})—, —C(R^{a})═C(R^{b})—, —C(R^{a})═N—, —O—, —Si(R^{a})₂—, —S—, —SO₂—, —N(R^{a})—, and >C═Z. In some embodiments, Y is selected from the group consisting of: —CH₂—, —C(R^{a}R^{b})—, —CH₂CH₂—, —C(R^{a}R^{b})—C(R^{a}R^{b})—, —CH₂CH₂CH₂—, —C(R^{a}R^{b})C(R^{a}R^{b})C(R^{a}R^{b})—, —C(R^{a})═C(R^{b})—, and —C(R^{a})═N—.

[0195] In some embodiments, Y is selected from the group consisting of: —CH₂—, —CHR^{a}—, —CHCH₃—, CR^{a}R^{b}—, and —X—Y— together designate a bivalent linker group (also referred to as a radicle) together designate a bivalent linker group consisting of 1, 2, 3 or 4 groups/atoms selected from the group consisting of —C(R^{a}R^{b})—, —C(R^{a})═C(R^{b})—, —C(R^{a})═N—, —O—, —Si(R^{a})₂—, —S—, —SO₂—, —N(R^{a})—, and >C═Z.

[0196] In some embodiments, —X—Y designates a biradical selected from the groups consisting of: —X—CH₂—, —X—CR^{a}R^{b}—, —X—CHR^{a}—, —X—C(HCH₃)⁻, —O—Y—, —O—CH₂—, —S—CH₂—, —NH—CH₂—, —O—CHCH₃—, —CH₂—O—CH₂, —O—CH(CH₃CH₃)—, —O—CH₂—CH₂—, OCH₂—CH₂—CH₂—, —O—CH₂OCH₂—, —O—NCH₂—, —C(═CH₂)—CH₂—, —NR^{a}—CH₂—, N—O—CH₂, —S—CR^{a}R^{b}— and —S—CHR^{a}—.

[0197] In some embodiments —X—Y— designates —O—CH₂— or —O—CH(CH₃)—.

[0198] In certain embodiments, Z is selected from —O—, —S—, and —N(R^{a})—, and R^{a} and, when present R^{b}, each is independently selected from hydrogen, optionally substituted C₁₋₆-alkyl, optionally substituted C₂₋₆-alkenyl, optionally substituted C₂₋₆-alkynyl, hydroxy, optionally substituted C₁₋₆-alkoxy, C₂₋₆-alkoxyalkyl, C₂₋₆-alkenyloxy, carboxy, C₁₋₆-alkoxycarbonyl, C₁₋₆-alkylcarbonyl, formyl, aryl, aryloxy-carbonyl, aryloxy, arylcarbonyl, heteroaryl, heteroaryloxy-carbonyl, heteroaryloxy, heteroarylcarbonyl, amino, mono- and di(C₁₋₆-alkyl)amino, carbamoyl, mono- and di(C₁₋₆-alkyl)-amino-carbonyl, amino-C₁₋₆-alkyl-aminocarbonyl, mono- and di(C₁₋₆-alkyl)amino-C₁₋₆-alkyl-aminocarbonyl, C₁₋₆-alkyl-carbonylamino, carbamido, C₁₋₆-alkanoyloxy, sulphono, C₁₋₆-alkylsulphonyloxy, nitro, azido, sulphanyl, C₁₋₆-alkylthio, halogen, where aryl and heteroaryl may be optionally substituted and where two geminal substituents R^{a} and R^{b} together may designate optionally substituted methylene (═CH₂), wherein for all chiral centers, asymmetric groups may be found in either R or S orientation.

[0199] In some embodiments, R¹, R², R³, R⁵ and R^{5*} are independently selected from the group consisting of: hydrogen, optionally substituted C₁₋₆-alkyl, optionally substituted C₂₋₆-alkenyl, optionally substituted C₂₋₆-alkynyl, hydroxy, C₁₋₆-alkoxy, C₂₋₆-alkoxyalkyl, C₂₋₆-alkenyloxy, carboxy, C₁₋₆-alkoxycarbonyl, C₁₋₆-alkylcarbonyl, formyl, aryl, aryloxy-carbonyl, aryloxy, arylcarbonyl, heteroaryl, heteroaryloxy-carbonyl, heteroaryloxy, heteroarylcarbonyl, amino, mono- and di(C₁₋₆-alkyl)amino, carbamoyl, mono- and di(C₁₋₆-alkyl)-amino-carbonyl, amino-C₁₋₆-alkyl-aminocarbonyl, mono- and di(C₁₋₆-alkyl)amino-C₁_6-alkyl-aminocarbonyl, C₁₋₆-alkyl-carbonylamino, carbamido, C₁₋₆-alkanoyloxy, sulphono, C₁₋₆-alkylsulphonyloxy, nitro, azido, sulphanyl, C₁₋₆-alkylthio, halogen, where aryl and heteroaryl may be optionally substituted, and where two geminal substituents together may designate oxo, thioxo, imino, or optionally substituted methylene.

[0200] In some embodiments R¹, R², R³, R⁵ and R^{5*} are independently selected from C₁₋₆ alkyl, such as methyl, and hydrogen.

[0201] In some embodiments R¹, R², R³, R⁵ and R^{5*} are all hydrogen.

[0202] In some embodiments R¹, R², R³, are all hydrogen, and either R⁵ and R^{5*} is also hydrogen and the other of R⁵ and R^{5*} is other than hydrogen, such as C₁₋₆ alkyl such as methyl.

[0203] In some embodiments, R^{a} is either hydrogen or methyl. In some embodiments, when present, R^{b} is either hydrogen or methyl.

[0204] In some embodiments, one or both of R^{a} and R^{b} is hydrogen.

[0205] In some embodiments, one of R^{a} and R^{b} is hydrogen and the other is other than hydrogen.

[0206] In some embodiments, one of R^{a} and R^{b} is methyl and the other is hydrogen.

[0207] In some embodiments, both of R^{a} and R^{b} are methyl.

[0208] In some embodiments, the biradical —X—Y— is —O—CH₂—, W is O, and all of R¹, R², R³, R⁵ and R^{5*} are all hydrogen. Such LNA nucleosides are disclosed in WO99/014226, WO00/66604, WO98/039352 and WO2004/046160 which are all hereby incorporated by reference, and include what are commonly known as beta-D-oxy LNA and alpha-L-oxy LNA nucleosides.

[0209] In some embodiments, the biradical —X—Y— is —S—CH₂—, W is O, and all of R¹, R², R³, R⁵ and R^{5*} are all hydrogen. Such thio LNA nucleosides are disclosed in WO99/014226 and WO2004/046160.

[0210] In some embodiments, the biradical —X—Y— is —NH—CH₂—, W is O, and all of R¹, R², R³, R⁵ and R^{5*} are all hydrogen. Such amino LNA nucleosides are disclosed in WO99/014226 and WO2004/046160.

[0211] In some embodiments, the biradical —X—Y— is —O—CH₂—CH₂— or —O—CH₂—CH₂—CH₂—, W is O, and all of R¹, R², R³, R⁵ and R^{5*} are all hydrogen. Such LNA nucleosides are disclosed in WO00/047599 and Morita et al, Bioorganic & Med.Chem. Lett. 12 73-76, which are hereby incorporated by reference, and include what are commonly known as 2′-O—4′C-ethylene bridged nucleic acids (ENA).

[0212] In some embodiments, the biradical —X—Y— is —O—CH₂—, W is O, and all of R¹, R², R³, and one of R⁵ and R^{5*} are hydrogen, and the other of R⁵ and R^{5*} is other than hydrogen such as C₁₋₆ alkyl, such as methyl. Such 5′ substituted LNA nucleosides are disclosed in WO2007/134181.

[0213] In some embodiments, the biradical —X—Y— is —O—CR^{a}R^{b}—, wherein one or both of R^{a} and R^{b} are other than hydrogen, such as methyl, W is O, and all of R¹, R², R³, and one of R⁵ and R^{5*} are hydrogen, and the other of R⁵ and R^{5*} is other than hydrogen such as C₁₋₆ alkyl, such as methyl.

[0214] Such bis modified LNA nucleosides are disclosed in WO2010/077578.

[0215] In some embodiments, the biradical —X—Y— designate the bivalent linker group —O—CH(CH₂OCH₃)—(2′ O-methoxyethyl bicyclic nucleic acid—Seth at al., 2010, J. Org. Chem. Vol 75(5) pp. 1569-81). In some embodiments, the biradical —X—Y— designate the bivalent linker group —O—CH(CH₂CH₃)—(2′O-ethyl bicyclic nucleic acid—Seth at al., 2010, J. Org. Chem. Vol 75(5) pp. 1569-81). In some embodiments, the biradical —X—Y— is —O—CHR^{a}—, W is O, and all of R¹, R², R³, R⁵ and R^{5*} are all hydrogen. Such 6′ substituted LNA nucleosides are disclosed in WO10036698 and WO07090071.

[0216] In some embodiments, the biradical —X—Y— is —O—CH(CH₂OCH₃)—, W is O, and all of R¹, R², R³, R⁵ and R^{5*} are all hydrogen. Such LNA nucleosides are also known as cyclic MOEs in the art (cMOE) and are disclosed in WO07090071.

[0217] In some embodiments, the biradical —X—Y— designates the bivalent linker group —O—CH(CH₃)—. —in either the R- or S-configuration. In some embodiments, the biradical —X—Y— together designate the bivalent linker group —O—CH₂—O—CH₂— (Seth at al., 2010, J. Org. Chem). In some embodiments, the biradical —X—Y— is —O—CH(CH₃)—, W is O, and all of R¹, R², R³, R⁵ and R^{5*} are all hydrogen. Such 6′ methyl LNA nucleosides are also known as cET nucleosides in the art, and may be either (S)cET or (R)cET stereoisomers, as disclosed in WO07090071 (beta-D) and WO2010/036698 (alpha-L)).

[0218] In some embodiments, the biradical —X—Y— is —O—CR^{a}R^{b}—, wherein in neither R^{a} or R^{b} is hydrogen, W is O, and all of R¹, R², R³, R⁵ and R^{5*} are all hydrogen. In some embodiments, R^{a} and R^{b} are both methyl. Such 6′ di-substituted LNA nucleosides are disclosed in WO 2009006478.

[0219] In some embodiments, the biradical —X—Y— is —S—CHR^{a}—, W is O, and all of R¹, R², R³, R⁵ and R^{5*} are all hydrogen. Such 6′ substituted thio LNA nucleosides are disclosed in WO11156202. In some 6′ substituted thio LNA embodiments R^{a} is methyl.

[0220] In some embodiments, the biradical —X—Y— is —C(═CH2)—C(R^{a}R^{b})—, such as —C(═CH₂)—CH₂—, or —C(═CH₂)—CH(CH₃)—W is O, and all of R¹, R², R³, R⁵ and R^{5*} are all hydrogen. Such vinyl carbo LNA nucleosides are disclosed in WO08154401 and WO09067647.

[0221] In some embodiments the biradical —X—Y— is —N(—OR^{a})—, W is O, and all of R¹, R², R³, R⁵ and R^{5*} are all hydrogen. In some embodiments R^{a} is C₁₋₆ alkyl such as methyl. Such LNA nucleosides are also known as N substituted LNAs and are disclosed in WO2008/150729. In some embodiments, the biradical —X—Y— together designate the bivalent linker group —O—NR^{a}—CH₃— (Seth at al., 2010, J. Org. Chem). In some embodiments the biradical —X—Y— is —N(R′)—, W is O, and all of R¹, R², R³, R⁵ and R^{5*} are all hydrogen. In some embodiments R^{a} is C₁₋₆alkyl such as methyl.

[0222] In some embodiments, one or both of R⁵ and R^{5*} is hydrogen and, when substituted the other of R⁵ and R^{5*} is C₁₋₆ alkyl such as methyl. In such an embodiment, R¹, R², R³, may all be hydrogen, and the biradical —X—Y— may be selected from —O-CH₂- or —O—CH(CR^{a})—, such as —O-CH(CH₃)—.

[0223] In some embodiments, the biradical is —CR^{a}R^{b}—O—CR^{a}R^{b}—, such as CH₂—O—CH₂—, W is O and all of R¹, R², R³, R⁵ and R^{5*} are all hydrogen. In some embodiments R^{a} is C₁₋₆alkyl such as methyl. Such LNA nucleosides are also known as conformationally restricted nucleotides (CRNs) and are disclosed in WO2013036868.

[0224] In some embodiments, the biradical is —O—CR^{a}R^{b}—O—CR^{a}R^{b}, such as O—CH₂—O—CH₂—, W is O and all of R¹, R², R³, R⁵ and R^{5*} are all hydrogen. In some embodiments R^{a} is C₁₋₆ alkyl such as methyl.

[0225] Such LNA nucleosides are also known as COC nucleotides and are disclosed in Mitsuoka et al., Nucleic Acids Research 2009 37(4), 1225-1238.

[0226] It will be recognized than, unless specified, the LNA nucleosides may be in the beta-D or alpha-L stereoisoform.

[0227] Certain examples of LNA nucleosides are presented in Scheme 1.

[chemical structure]

[chemical structure]

[0228] Particular LNA nucleosides are beta-D-oxy-LNA, 6′-methyl-beta-D-oxy LNA such as (S)-6′-methyl-beta-D-oxy-LNA (ScET) and ENA.

[0229] As illustrated in the examples, in some embodiments of the disclosure the LNA nucleosides in the oligonucleotides are beta-D-oxy-LNA nucleosides.

[0230] If one of the starting materials or compounds of the invention contain one or more functional groups which are not stable or are reactive under the reaction conditions of one or more reaction steps, appropriate protecting groups (as described e.g. in “Protective Groups in Organic Chemistry” by T. W. Greene and P. G. M. Wuts, 3rd Ed., 1999, Wiley, New York) can be introduced before the critical step applying methods well known in the art. Such protecting groups can be removed at a later stage of the synthesis using standard methods described in the literature. Examples of protecting groups are tert-butoxycarbonyl (Boc), 9-fluorenylmethyl carbamate (Fmoc), 2-trimethylsilylethyl carbamate (Teoc), carbobenzyloxy (Cbz) and p-methoxybenzyloxycarbonyl (Moz).

[0231] The compounds described herein can contain several asymmetric centers and can be present in the form of optically pure enantiomers, mixtures of enantiomers such as, for example, racemates, mixtures of diastereoisomers, diastereoisomeric racemates or mixtures of diastereoisomeric racemates.

[0232] The term “asymmetric carbon atom” means a carbon atom with four different substituents. According to the Cahn-Ingold-Prelog Convention an asymmetric carbon atom can be of the “R” or “S” configuration.

[0233] In the present description the term “alkyl”, alone or in combination, signifies a straight-chain or branched-chain alkyl group with 1 to 8 carbon atoms, particularly a straight or branched-chain alkyl group with 1 to 6 carbon atoms and more particularly a straight or branched-chain alkyl group with 1 to 4 carbon atoms. Examples of straight-chain and branched-chain C₁-C₈ alkyl groups are methyl, ethyl, propyl, isopropyl, butyl, isobutyl, tert.-butyl, the isomeric pentyls, the isomeric hexyls, the isomeric heptyls and the isomeric octyls, particularly methyl, ethyl, propyl, butyl and pentyl. Particular examples of alkyl are methyl, ethyl and propyl.

[0234] The term “cycloalkyl”, alone or in combination, signifies a cycloalkyl ring with 3 to 8 carbon atoms and particularly a cycloalkyl ring with 3 to 6 carbon atoms. Examples of cycloalkyl are cyclopropyl, cyclobutyl, cyclopentyl, cyclohexyl, cycloheptyl and cyclooctyl, more particularly cyclopropyl and cyclobutyl. A particular example of “cycloalkyl” is cyclopropyl.

[0235] The term “alkoxy”, alone or in combination, signifies a group of the formula alkyl-O— in which the term “alkyl” has the previously given significance, such as methoxy, ethoxy, n-propoxy, isopropoxy, n-butoxy, isobutoxy, sec.butoxy and tert.butoxy. Particular “alkoxy” are methoxy and ethoxy. Methoxyethoxy is a particular example of “alkoxyalkoxy”.

[0236] The term “oxy”, alone or in combination, signifies the —O— group.

[0237] The term “alkenyl”, alone or in combination, signifies a straight-chain or branched hydrocarbon residue comprising an olefinic bond and up to 8, preferably up to 6, particularly preferred up to 4 carbon atoms. Examples of alkenyl groups are ethenyl, 1-propenyl, 2-propenyl, isopropenyl, 1-butenyl, 2-butenyl, 3-butenyl and isobutenyl.

[0238] The term “alkynyl”, alone or in combination, signifies a straight-chain or branched hydrocarbon residue comprising a triple bond and up to 8, preferably up to 6, particularly preferred up to 4 carbon atoms.

[0239] The terms “halogen” or “halo”, alone or in combination, signifies fluorine, chlorine, bromine or iodine and particularly fluorine, chlorine or bromine, more particularly fluorine. The term “halo”, in combination with another group, denotes the substitution of said group with at least one halogen, particularly substituted with one to five halogens, particularly one to four halogens, i.e. one, two, three or four halogens.

[0240] The term “haloalkyl”, alone or in combination, denotes an alkyl group substituted with at least one halogen, particularly substituted with one to five halogens, particularly one to three halogens. Examples of haloalkyl include monofluoro-, difluoro- or trifluoro-methyl, -ethyl or -propyl, for example 3,3,3-trifluoropropyl, 2-fluoroethyl, 2,2,2-trifluoroethyl, fluoromethyl or trifluoromethyl. Fluoromethyl, difluoromethyl and trifluoromethyl are particular “haloalkyl”.

[0241] The term “halocycloalkyl”, alone or in combination, denotes a cycloalkyl group as defined above substituted with at least one halogen, particularly substituted with one to five halogens, particularly one to three halogens. Particular example of “halocycloalkyl” are halocyclopropyl, in particular fluorocyclopropyl, difluorocyclopropyl and trifluorocyclopropyl.

[0242] The terms “hydroxyl” and “hydroxy”, alone or in combination, signify the —OH group.

[0243] The terms “thiohydroxyl” and “thiohydroxy”, alone or in combination, signify the —SH group.

[0244] The term “carbonyl”, alone or in combination, signifies the —C(O)— group.

[0245] The term “carboxy” or “carboxyl”, alone or in combination, signifies the —COOH group.

[0246] The term “amino”, alone or in combination, signifies the primary amino group (—NH₂), the secondary amino group (—NH—), or the tertiary amino group (—N—).

[0247] The term “alkylamino”, alone or in combination, signifies an amino group as defined above substituted with one or two alkyl groups as defined above.

[0248] The term “sulfonyl”, alone or in combination, means the —SO₂ group.

[0249] The term “sulfinyl”, alone or in combination, signifies the —SO— group.

[0250] The term “sulfanyl”, alone or in combination, signifies the —S— group.

[0251] The term “cyano”, alone or in combination, signifies the —CN group.

[0252] The term “azido”, alone or in combination, signifies the —N₃ group.

[0253] The term “nitro”, alone or in combination, signifies the NO₂ group.

[0254] The term “formyl”, alone or in combination, signifies the —C(O)H group.

[0255] The term “carbamoyl”, alone or in combination, signifies the —C(O)NH₂ group.

[0256] The term “cabamido”, alone or in combination, signifies the —NH—C(O)—NH₂ group.

[0257] The term “aryl”, alone or in combination, denotes a monovalent aromatic carbocyclic mono- or bicyclic ring system comprising 6 to 10 carbon ring atoms, optionally substituted with 1 to 3 substituents independently selected from halogen, hydroxyl, alkyl, alkenyl, alkynyl, alkoxy, alkoxyalkyl, alkenyloxy, carboxyl, alkoxycarbonyl, alkylcarbonyl and formyl. Examples of aryl include phenyl and naphthyl, in particular phenyl.

[0258] The term “heteroaryl”, alone or in combination, denotes a monovalent aromatic heterocyclic mono- or bicyclic ring system of 5 to 12 ring atoms, comprising 1, 2, 3 or 4 heteroatoms selected from N, O and S, the remaining ring atoms being carbon, optionally substituted with 1 to 3 substituents independently selected from halogen, hydroxyl, alkyl, alkenyl, alkynyl, alkoxy, alkoxyalkyl, alkenyloxy, carboxyl, alkoxycarbonyl, alkylcarbonyl and formyl. Examples of heteroaryl include pyrrolyl, furanyl, thienyl, imidazolyl, oxazolyl, thiazolyl, triazolyl, oxadiazolyl, thiadiazolyl, tetrazolyl, pyridinyl, pyrazinyl, pyrazolyl, pyridazinyl, pyrimidinyl, triazinyl, azepinyl, diazepinyl, isoxazolyl, benzofuranyl, isothiazolyl, benzothienyl, indolyl, isoindolyl, isobenzofuranyl, benzimidazolyl, benzoxazolyl, benzoisoxazolyl, benzothiazolyl, benzoisothiazolyl, benzooxadiazolyl, benzothiadiazolyl, benzotriazolyl, purinyl, quinolinyl, isoquinolinyl, quinazolinyl, quinoxalinyl, carbazolyl or acridinyl.

[0259] The term “heterocyclyl”, alone or in combination, signifies a monovalent saturated or partly unsaturated mono- or bicyclic ring system of 4 to 12, in particular 4 to 9 ring atoms, comprising 1, 2, 3 or 4 ring heteroatoms selected from N, O and S, the remaining ring atoms being carbon, optionally substituted with 1 to 3 substituents independently selected from halogen, hydroxyl, alkyl, alkenyl, alkynyl, alkoxy, alkoxyalkyl, alkenyloxy, carboxyl, alkoxycarbonyl, alkylcarbonyl and formyl. Examples for monocyclic saturated heterocyclyl are azetidinyl, pyrrolidinyl, tetrahydrofuranyl, tetrahydro-thienyl, pyrazolidinyl, imidazolidinyl, oxazolidinyl, isoxazolidinyl, thiazolidinyl, piperidinyl, tetrahydropyranyl, tetrahydrothiopyranyl, piperazinyl, morpholinyl, thiomorpholinyl, 1,1-dioxo-thiomorpholin-4-yl, azepanyl, diazepanyl, homopiperazinyl, or oxazepanyl. Examples for bicyclic saturated heterocycloalkyl are 8-aza-bicyclo[3.2.1]octyl, quinuclidinyl, 8-oxa-3-aza-bicyclo[3.2.1]octyl, 9-aza-bicyclo[3.3.1]nonyl, 3-oxa-9-aza-bicyclo[3.3.1]nonyl, or 3-thia-9-aza-bicyclo[3.3.1]nonyl. Examples for partly unsaturated heterocycloalkyl are dihydrofuryl, imidazolinyl, dihydro-oxazolyl, tetrahydro-pyridinyl or dihydropyranyl.

### II.E. Nuclease Mediated Degradation

[0260] Nuclease mediated degradation refers to an oligonucleotide capable of mediating degradation of a complementary nucleotide sequence when forming a duplex with such a sequence.

[0261] In some embodiments, the oligonucleotide may function via nuclease mediated degradation of the target nucleic acid, where the oligonucleotides of the disclosure are capable of recruiting a nuclease, particularly and endonuclease, preferably endoribonuclease (RNase), such as RNase H. Examples of oligonucleotide designs which operate via nuclease mediated mechanisms are oligonucleotides which typically comprise a region of at least 5 or 6 DNA nucleosides and are flanked on one side or both sides by affinity enhancing nucleosides, for example gapmers.

### II.F. RNase H Activity and Recruitment

[0262] The RNase H activity of an antisense oligonucleotide refers to its ability to recruit RNase H when in a duplex with a complementary RNA molecule and induce cleavage and subsequent degradation of the complementary RNA molecule. WO01/23613 provides in vitro methods for determining RNase H activity, which may be used to determine the ability to recruit RNase H. Typically an oligonucleotide is deemed capable of recruiting RNase H if it, when provided with a complementary target nucleic acid sequence, has an initial rate, as measured in pmol/l/min, of at least 5%, such as at least 10% or more than 20% of the of the initial rate determined when using a oligonucleotide having the same base sequence as the modified oligonucleotide being tested, but containing only DNA monomers, with phosphorothioate linkages between all monomers in the oligonucleotide, and using the methodology provided by Example 91-95 of WO01/23613.

[0263] In some embodiments, an oligonucleotide is deemed essentially incapable of recruiting RNaseH if, when provided with the complementary target nucleic acid, the RNaseH initial rate, as measured in pmol/l/min, is less than 20%, such as less than 10%, such as less than 5% of the initial rate determined when using a oligonucleotide having the same base sequence as the oligonucleotide being tested, but containing only DNA monomers, with no 2′ substitutions, with phosphorothioate linkages between all monomers in the oligonucleotide, and using the methodology provided by Example 91-95 of WO01/23613.

### II.G. ASO Design

[0264] The ASO of the disclosure can comprise a nucleotide sequence which comprises both natural nucleotides and nucleotide analogues, and can be in the form of a gapmer. Examples of configurations of a gapmer that can be used with the ASO of the disclosure are described in U.S. Patent Appl. Publ. No. 2012/0322851.

[0265] The term gapmer as used herein refers to an antisense oligonucleotide which comprises a region of RNase H recruiting oligonucleotides (gap) which is flanked 5′ and 3′ by one or more affinity enhancing modified nucleosides (flanks). Various gapmer designs are described herein. The term LNA gapmer is a gapmer oligonucleotide wherein at least one of the affinity enhancing modified nucleosides is an LNA nucleoside. The term mixed wing gapmer refers to a LNA gapmer wherein the flank regions comprise at least one LNA nucleoside and at least one DNA nucleoside or non-LNA modified nucleoside, such as at least one 2′ substituted modified nucleoside, such as, for example, 2′—O-alkyl-RNA, 2′—O-methyl-RNA, 2′-alkoxy-RNA, 2′—O-methoxyethyl-RNA (MOE), 2′-amino-DNA, 2′-Fluoro-RNA and 2′-F-ANA nucleoside(s). In some embodiments the mixed wing gapmer has one flank which comprises LNA nucleosides (e.g., 5′ or 3′) and the other flank (3′ or 5′ respectfully) comprises 2′ substituted modified nucleoside(s).

[0266] In some embodiments, in addition to enhancing affinity of the ASO for the target region, some nucleoside analogues also mediate RNase (e.g., RNaseH) binding and cleavage. Since α-L-LNA monomers recruit RNaseH activity to a certain extent, in some embodiments, gap regions (e.g., region B as referred to herein) of ASOs containing α-L-LNA monomers consist of fewer monomers recognizable and cleavable by the RNaseH, and more flexibility in the mixmer construction is introduced.

### II.G.1. Gapmer Design

[0267] In one embodiment, the ASO of the disclosure is a gapmer. A gapmer ASO is an ASO which comprises a contiguous stretch of nucleotides which is capable of recruiting an RNase, such as RNaseH, such as a region of at least 6 DNA nucleotides, referred to herein in as region B (B), wherein region B is flanked both 5′ and 3′ by regions of affinity enhancing nucleotide analogues, such as from 1-10 nucleotide analogues 5′ and 3′ to the contiguous stretch of nucleotides which is capable of recruiting RNase—these regions are referred to as regions A (A) and C (C) respectively.

[0268] In certain embodiments, the gapmer is an alternating flank gapmer, examples of which are discussed below. In certain embodiments, the alternating flank gapmer exhibits less off target binding than a traditional gapmer. In certain embodiments, the alternating flank gapmer has better long term tolerability than a traditional gapmer.

[0269] An alternating flank gapmer can comprise a (poly)nucleotide sequence of formula (5′ to 3′), A-B-C, wherein: region A (A) (5′ region or a first wing sequence) comprises at least one nucleotide analogue, such as at least one LNA unit, such as from 1-10 nucleotide analogues, such as LNA units, and; region B (B) comprises at least six consecutive nucleotides which are capable of recruiting RNase (when formed in a duplex with a complementary RNA molecule, such as the pre-mRNA or mRNA target), such as DNA nucleotides, and; region C (C) (3′region or a second wing sequence) comprises at least one nucleotide analogue, such as at least one LNA unit, such as from 1-10 nucleotide analogues, such as LNA units; wherein regions A and C can include at any position in A and C 1-3 insertions of DNA nucleotide regions (e.g., DNA Insertions), in which these DNA insertions can each be 1-6 DNA units long.

[0270] In certain other embodiments, the gapmer, e.g., an alternating flank gapmer, comprises a (poly)nucleotide sequence of formula (5′ to 3′), A-B-C, or optionally A-B-C-D or D-A-B-C, wherein: region A (A) (5′ region) comprises at least one nucleotide analogue, such as at least one LNA unit, such as from 1-10 nucleotide analogues, such as LNA units, and; region B (B) comprises at least five consecutive nucleotides which are capable of recruiting RNase (when formed in a duplex with a complementary RNA molecule, such as the mRNA target), such as DNA nucleotides, and; region C (C) (3′region) comprises at least one nucleotide analogue, such as at least one LNA unit, such as from 1-10 nucleotide analogues, such as LNA units, and; region D (D), when present comprises 1, 2 or 3 nucleotide units, such as DNA nucleotides.

[0271] In some embodiments, region A comprises 1, 2, 3, 4, 5, 6, 7, 8, 9, or 10 nucleotide analogues, such as LNA units, such as from 2-5 nucleotide analogues, such as 2-5 LNA units, such as 2-5 nucleotide analogues, such as 3-5 LNA units; and/or region C consists of 1, 2, 3, 4, 5, 6, 7, 8, 9, or 10 nucleotide analogues, such as LNA units, such as from 2-5 nucleotide analogues, such as 2-5 LNA units, such as 2-5 nucleotide analogues, such as 3-5 LNA units.

[0272] In some embodiments B comprises 5, 6, 7, 8, 9, 10, 11, 12, 13, 14, 15, 16, 17, 18, 19, 20, 21, 22, or 23 consecutive nucleotides which are capable of recruiting RNase, or from 6-14, 7-14, 8-14, or from 7-10, or from 7-9, such as 8, such as 9, such as 10, or such as 14 consecutive nucleotides which are capable of recruiting RNase. In some embodiments region B comprises at least five DNA nucleotide unit, such as 5-23 DNA units, such as from 5-20 DNA units, such as from 5-18 DNA units, such as from 6-14 DNA units, such as from 8-14 DNA units, such as 5, 6, 7, 8, 9, 10, 11, 12, 13, or 14 DNA units.

[0273] In some embodiments region A comprises 3, 4, or 5 nucleotide analogues, such as LNA, region B consists of 5, 6, 7, 8, 9, 10, 11, 12, 13, or 14 DNA units, and region C consists of 3, 4, or 5 nucleotide analogues, such as LNA. Such designs include (A-B-C) 5-10-5, 3-14-3, 3-10-3, 3-10-4, 4-10-3, 3-9-3, 3-9-4, 4-9-3, 3-8-3, 3-8-4, 4-8-3, 3-7-3, 3-7-4, and 4-7-3, and can further include region D, which can have one to 3 nucleotide units, such as DNA units.

[0274] In some embodiments, the ASO of the disclosure, e.g., an alternating flank gapmer, comprises the formula of 5′-A-B-C-3′, wherein

(i) region B is a contiguous sequence of at least 5, 6, 7, or 8, e.g., 5 to 18 DNA units, which are capable of recruiting RNase;
(ii) region A is a first wing sequence of 1 to 10 nucleotides, wherein the first wing sequence comprises one or more nucleotide analogues and optionally one or more DNA units (e.g., DNA insertion) and wherein at least one of the nucleotide analogues is located at the 3′ end of A; and
(iii) region C is a second wing sequence of 1 to 10 nucleotides, wherein the second wing sequence comprises one or more nucleotide analogues and optionally one or more DNA units (e.g., DNA insertion) and wherein at least one of the nucleotide analogues is located at the 5′ end of C.

[0275] In some embodiments, the first wing sequence (region A in the formula) comprises a combination of nucleotide analogues and DNA units selected from (i) 1-9 nucleotide analogues and 1 DNA unit; (ii) 1-8 nucleotide analogues and 1-2 DNA units; (iii) 1-7 nucleotide analogues and 1-3 DNA units; (iv) 1-6 nucleotide analogues and 1-4 DNA units; (v) 1-5 nucleotide analogues and 1-5 DNA units; (vi) 1-4 nucleotide analogues and 1-6 DNA units; (vii) 1-3 nucleotide analogues and 1-7 DNA units; (viii) 1-2 nucleotide analogues and 1-8 DNA units; and (ix) 1 nucleotide analogue and 1-9 DNA units.

[0276] In certain embodiments, the second wing sequence (region C in the formula) comprises a combination of nucleotide analogues and DNA unit selected from (i) 1-9 nucleotide analogues and 1 DNA unit; (ii) 1-8 nucleotide analogues and 1-2 DNA units; (iii) 1-7 nucleotide analogues and 1-3 DNA units; (iv) 1-6 nucleotide analogues and 1-4 DNA units; (v) 1-5 nucleotide analogues and 1-5 DNA units; (vi) 1-4 nucleotide analogues and 1-6 DNA units; (vii) 1-3 nucleotide analogues and 1-7 DNA units; (viii) 1-2 nucleotide analogues and 1-8 DNA units; and (ix) 1 nucleotide analogue and 1-9 DNA units.

[0277] In some embodiments, region A in the ASO formula has a sub-formula selected from the first wing design of any ASOs in FIGS. 1A to 1C and 2, and/or region C in the ASO formula has a sub-formula selected from the second wing design of any ASOs in FIGS. 1A to 1C and 2, wherein the upper letter is a nucleotide analogue (e.g., sugar modified analogue, which can also be written as L) and the lower letter is DNA (which can also be written as D).

[0278] In certain embodiments, the ASO, e.g., an alternating flank gapmer, has the formula of 5′ A-B-C 3′, wherein region B is a contiguous sequence of 5 to 18 DNA units, region A has a formula of LLDLL, LDLLL, or LLLDL and region C has a formula of LLDLL or LDLDLL, and wherein L is an LNA unit and D is a DNA unit.

[0279] In some embodiments, the ASO has the formula of 5′ A-B-C 3′, wherein region B is a contiguous sequence of 10 DNA units, region A has the formula of LDL, and region C has the formula of LLLL, wherein L is an LNA unit and D is a DNA unit.

[0280] Further gapmer designs are disclosed in WO2004/046160, which is hereby incorporated by reference in its entirety. WO2008/113832 hereby incorporated by reference in its entirety, refers to ‘shortmer’ gapmer ASOs. In some embodiments, ASOs presented herein can be such shortmer gapmers.

[0281] In some embodiments the ASO, e.g., an alternating flank gapmer, comprises a contiguous nucleotide sequence of a total of 10, 11, 12, 13, 14, 15, 16, 17, 18, 19, or 20 nucleotide units, wherein the contiguous nucleotide sequence is of formula (5′-3′), A-B-C, or optionally A-B-C-D or D-A-B-C, wherein; region A consists of 1, 2, 3, 4, or 5 nucleotide analogue units, such as LNA units; region B consists of 5, 6, 7, 8, 9, 10, 11, 12, 13, 14 or 15 contiguous nucleotide units which are capable of recruiting RNase when formed in a duplex with a complementary RNA molecule (such as a mRNA target); and region C consists of 1, 2, 3, 4, or 5 nucleotide analogue units, such as LNA units. When present, region D consists of a single DNA unit.

[0282] In some embodiments A comprises 1 LNA unit. In some embodiments region A comprises 2 LNA units. In some embodiments region A comprises 3 LNA units. In some embodiments region A comprises 4 LNA units. In some embodiments region A comprises 5 LNA units. In some embodiments region C comprises 1 LNA unit. In some embodiments C comprises 2 LNA units. In some embodiments region C comprises 3 LNA units. In some embodiments region C comprises 4 LNA units. In some embodiments region C comprises 5 LNA units. In some embodiments region B comprises 6 nucleotide units. In some embodiments region B comprises 7 nucleotide units. In some embodiments region B comprises 8 nucleotide units. In some embodiments region B comprises 9 nucleotide units. In certain embodiments, region B comprises 10 nucleoside units. In certain embodiments, region B comprises 11 nucleoside units. In certain embodiments, region B comprises 12 nucleoside units. In certain embodiments, region B comprises 13 nucleoside units. In certain embodiments, region B comprises 14 nucleoside units, region B comprises 15 nucleoside units. In certain embodiments, region B comprises 7-23 DNA monomers or 5-18 DNA monomers. In some embodiments region B comprises from 6-23 DNA units, such as 6, 7, 8, 9, 10, 11, 12, 13, 14, 15, 16, 17, 18, 19, 20, 21, 22, or 23 DNA units. In some embodiments region B consists of DNA units.

[0283] In some embodiments region B comprises at least one LNA unit which is in the alpha-L configuration, such as 2, 3, 4, 5, 6, 7, 8, 9, 10, 11, 12, 13, 14, 15, 16, 17, 18, 19, 20, 21, 22, or 23 LNA units in the alpha-L-configuration. In some embodiments region B comprises at least one alpha-L-oxy LNA unit or wherein all the LNA units in the alpha-L-configuration are alpha-L-oxy LNA units.

[0284] In some embodiments the number of nucleotides present in A-B-C are selected from (nucleotide analogue units—region B—nucleotide analogue units): 1-8-1, 1-8-2, 2-8-1, 2-8-2, 3-8-3, 2-8-3, 3-8-2, 4-8-1, 4-8-2, 1-8-4, 2-8-4, or 1-9-1, 1-9-2, 2-9-1, 2-9-2, 2-9-3, 3-9-2, 1-9-3, 3-9-1, 4-9-1, 1-9-4, 4-9-4 or 1-10-1, 1-10-2, 2-10-1, 2-10-2, 1-10-3, 3-10-1 and 4-10-4 or 3-11-4, 4-11-3 and 4-11-4 or 3-12-4 and 4-12-4, or 3-13-3 and 3-13-4 or 1-14-4, or 1-15-4 and 2-15-3. In some embodiments the number of nucleotides in A-B-C is selected from: 2-7-1, 1-7-2, 2-7-2, 3-7-3, 2-7-3, 3-7-2, 3-7-4, and 4-7-3.

[0285] In other embodiments, the ASO contains 10 DNA units in B, LDLLL in A (first wing) and LLDLL in C (second wing). In yet other embodiments, the ASO contains 9 DNA units in B, LDDLL in A, and LDLDLL in C. In still other embodiments, the ASO contains 10 DNA units in B, LLDLL in A, and LLDLL in C. In further embodiments, the ASO contains 9 DNA units in B, LLLLL in A, and LDDLL in C. In certain embodiments, each of regions A and C comprises three LNA monomers, and region B consists of 7, 8, 9, 10, 11, 12, 13, 14, or 15 nucleoside monomers, for example, DNA monomers. In some embodiments both A and C consist of two LNA units each, and B consists of 7, 8, or 9 nucleotide units, for example DNA units. In various embodiments, other gapmer designs include those where regions A and/or C consists of 3, 4, 5 or 6 nucleoside analogues, such as monomers containing a 2′—O-methoxyethyl-ribose sugar (2′-MOE) or monomers containing a 2′-fluoro-deoxyribose sugar, and region B consists of 7, 8, 9, 10, 11, 12, 13, 14, 15, 16, 17, 18, 19, 20, 21, 22, or 23 nucleosides, such as DNA monomers, where regions A-B-C have 3-8-3, 3-9-3, 3-10-3, 5-10-5 or 4-12-4 monomers. Further gapmer designs are disclosed in WO 2007/146511A2, hereby incorporated by reference in its entirety.

[0286] In some embodiments, the alternating flank ASO has at least 10 contiguous nucleotides, comprising region A, region B, and region C (A-B-C), wherein region B comprises at least 5 consecutive nucleoside units and is flanked at 5′ by region A of 1-8 contiguous nucleoside units and at 3′ by region C of 1-8 contiguous nucleoside units, wherein region B, when formed in a duplex with a complementary RNA, is capable of recruiting RNaseH, and wherein region A and region C are selected from the group consisting of:

(i) region A comprises a 5′ LNA nucleoside unit and a 3′ LNA nucleoside unit, and at least one DNA nucleoside unit between the 5′ LNA nucleoside unit and the 3′ LNA nucleoside unit, and, region C comprises at least two 3′ LNA nucleosides;
(ii) region A comprises at least one 5′ LNA nucleoside and region C comprises a 5′ LNA nucleoside unit, at least two terminal 3′ LNA nucleoside units, and at least one DNA nucleoside unit between the 5′ LNA nucleoside unit and the 3′ LNA nucleoside units, and
(iii) region A comprises a 5′ LNA nucleoside unit and a 3′ LNA nucleoside unit, and at least one DNA nucleoside unit between the 5′ LNA nucleoside unit and the 3′ LNA nucleoside unit; and region C comprises a 5′ LNA nucleoside unit, at least two terminal 3′ LNA nucleoside units, and at least one DNA nucleoside unit between the 5′ LNA nucleoside unit and the 3′ LNA nucleoside units.

[0287] In some embodiments, region A or region C comprises 1, 2, or 3 DNA nucleoside units. In other embodiments, region A and region C comprise 1, 2, or 3 DNA nucleoside units. In yet other embodiments, region B comprises at least five consecutive DNA nucleoside units. In certain embodiments, region B comprises 6, 7, 8, 9, 10, 11, 12, 13 or 14 consecutive DNA nucleoside units. In some embodiments, region B is 8, 9 10, 11, or 12 nucleotides in length. In other embodiments, region A comprises two 5′ terminal LNA nucleoside units. In some embodiments, region A has formula 5′[LNA]₁-3[DNA]1-3[LNA]₁-3, or 5′[LNA]₁-2[DNA]1-2[LNA]1-2[DNA]₁-2[LNA]₁-2. In other embodiments, region C has formula [LNA]1-3[DNA]₁-3[LNA]₂-33′, or [LNA]1-2[DNA]₁-2[LNA]₁₋₂[DNA]1-2[LNA]₂-33′. In yet other embodiments, region A has formula 5′[LNA]₁-3[DNA]1-3[LNA]₁-3, or 5′[LNA]₁-2[DNA]₁-2[LNA]₁-2[DNA]1-2[LNA]₁-2, and region C comprises 2, 3, 4 or 5 consecutive LNA nucleoside units. In some embodiments, region C has formula [LNA]1-3[DNA]₁-3[LNA]₂-33′ or [LNA]₁₋₂[DNA]1-2[LNA]1-2[DNA]₁-2[LNA]₂-33′, and region A comprises 1, 2, 3, 4 or 5 consecutive LNA nucleoside units. In still other embodiments, region A has a sequence of LNA and DNA nucleosides, 5′-3′ selected from the group consisting of L, LL, LDL, LLL, LLDL, LDLL, LDDL, LLLL, LLLLL, LLLDL, LLDLL, LDLLL, LLDDL, LDDLL, LLDLD, LDLLD, LDDDL, LLLLLL, LLLLDL, LLLDLL, LLDLLL, LDLLLL, LLLDDL, LLDLDL, LLDDLL, LDDLLL, LDLLDL, LDLDLL, LDDDLL, LLDDDL, and LDLDLD, wherein L represents a LNA nucleoside, and D represents a DNA nucleoside. In yet other embodiments, region C has a sequence of LNA and DNA nucleosides, 5′-3′ selected from the group consisting of LL, LLL, LLLL, LDLL, LLLLL, LLDLL, LDLLL, LDDLL, LDDLLL, LLDDLL, LDLDLL, LDDDLL, LDLDDLL, LDDLDLL, LDDDLLL, and LLDLDLL. In a further embodiment, region A has a sequence of LNA and DNA nucleosides, 5′-3′ selected from the group consisting of LDL, LLDL, LDLL, LDDL, LLLDL, LLDLL, LDLLL, LLDDL, LDDLL, LLDLD, LDLLD, LDDDL, LLLLDL, LLLDLL, LLDLLL, LDLLLL, LLLDDL, LLDLDL, LLDDLL, LDDLLL, LDLLDL, LDLDLL, LDDDLL, LLDDDL, and LDLDLD, and region C has a sequence of LNA and DNA nucleosides, 5′-3′ selected from the group consisting of LDLL, LLDL, LLLLL, LLDLL, LDLLL, LDDLL, LDDLLL, LLDDLL, LDLDLL, LDDDLL, LDLDDLL, LDDLDLL, LDDDLLL, and LLDLDLL.

[0288] In certain embodiments, the alternating flank ASO has contiguous nucleotides comprising a sequence of nucleosides, 5′-3′, selected from the group consisting of LDLDDDDDDDDDDLLLL, LLDDDLLDDDDDDDDLL, LDLLDLDDDDDDDDDLL, LLLDDDDDDDDDDLDLL, LLLDDDDDDDDDLDDLL, LLLDDDDDDDDLDDDLL, LLLDDDDDDDDLDLDLL, LLLDLDDDDDDDDDLLL, LLLDLDDDDDDDDLDLL, LLLLDDDDDDDDDLDLL, LLLLDDDDDDDDLDDLL, LLLDDDLDDDDDDDDLL, LLLDDLDDDDDDDDDLL, LLLDDLLDDDDDDDDLL, LLLDDLLDDDDDDDLLL, LLLLLDDDDDDDLDDLL, LDLLLDDDDDDDDDDLL, LDLLLDDDDDDDLDDLL, LDLLLLDDDDDDDDDLL, LLDLLLDDDDDDDDDLL, LLLDLDDDDDDDDDDLL, LLLDLDDDDDDDLDDLL, LLLDLLDDDDDDDDDLL, LLLLDDDDDDDLDDDLL, LLLLLDDDDDDDDDLDLL, LLLLDDDDDDDDDDLDLL, LLLDDDDDDDDDDDLDLL, LLDLDDDDDDDDDDLDLL, LDLLLDDDDDDDDDLDLL, LLLDDDDDDDDDDLDDLL, LLLDDDDDDDDDLDDDLL, LLLDDDDDDDDLDLDDLL, LLLLDDDDDDDDDLDDLL, LLLLDDDDDDDDDLDLLL, LLLLDDDDDDDDLDDDLL, LLLLDDDDDDDDLDDLLL, LLLLDDDDDDDDLDLDLL, LLLLDDDDDDDLDDLDLL, LLLLDDDDDDDLDLDDLL, LLDLLDDDDDDDDDDDLL, LLDLLLDDDDDDDDLDLL, LLLDLDDDDDDDDDDDLL, LLLDLDDDDDDDDDLDLL, LLLDLDDDDDDDDLDDLL, LLLDLDDDDDDDLDLDLL, LLLLDDDDDDDDDLLDLL, LLLLLDDDDDDDDDLDLLL, LLLLLDDDDDDDDDLDDLL, LLLLDDDDDDDDDDLLDLL, LLLLDDDDDDDDDDLDLLL, LLLLDDDDDDDDDDLDDLL, LLLDDDDDDDDDDDLLDLL, LLLDDDDDDDDDDDLDLLL, LLLLLDDDDDDDDDLLDLL, LLLDDDDDDDDDDDLDDLL, LLDLLDDDDDDDDDLDDLL, LLLDLDDDDDDDDDDLDLL, LLLDLDDDDDDDDDLDDLL, LLLLDDDDDDDDDLDLDLL, LLLLDDDDDDDDLLDLDLL, LLLDDDDDDDDDDDDLLLL, LDLLLDDDDDDDDDDLLDLL, LDDLLDDDDDDDDDDLDLLL, LLDLLDDDDDDDDDDLLDLL, LLDLDDDDDDDDDDDDLLLL, LLDDLDDDDDDDDDDDLLLL, LLLDLDDDDDDDDDDDLLLL, LLDLDDDDDDDDDDDDDLLL, LLDLLDDDDDDDDDDDLLLL, LLDDLDDDDDDDDDDDDLLL, LLLDDDDDDDDDDDLDDLLL, LLLDLDDDDDDDDDDDDLLL, LLDLLDDDDDDDDDDDDLLL, LLLLDDDDDDDDDDDLLDLL, LLLLDDDDDDDDDDLLDDLL, LLLDDLDDDDDDDDDLDLLL, LLDDLDLDDDDDDDDDLLLL, LLDDLLDDDDDDDDDLDLLL, LLLDLDDDDDDDDDLDLDLL, LLDLLDDDDDDDDDLDDLLL, LLLDLDDDDDDDDDDLDLLL, LLDLDDLDDDDDDDDDLLLL, LLLLDDDDDDDDDLDLDDLL, LLLDLDDDDDDDDDLDDLLL, LLDLDLDDDDDDDDDDLLLL, LLDLLDDDDDDDDDDLDLLL, LLDLDLDDDDDDDDDLLDLL, LLDDLLDDDDDDDDDLLDLL, LLLLDDDDDDDDDLDDLDLL, LLLDDLDDDDDDDDDLLDLL, LLDLLDDDDDDDDDLLDDLL, LLDLDLDDDDDDDDDLDLLL, LLLDLDDDDDDDDDLLDDLL, LLDDLLDDDDDDDDDDLLLL, LLDLLDDDDDDDDDLDLDLL, LLLLDDDDDDDDDDLDDLLL, LLLDDLDDDDDDDDDDLLLL, LLLDLDDDDDDDDDDLLDLL, LLLLDDDDDDDDDDLDLDLL, LLLLDDDDDDDDDDDLDLLL, and LLDDLLDDDDDDDDDDLDLL; wherein L represents a LNA nucleoside, and D represents a DNA nucleoside. In other embodiments, the LNA nucleoside is beta-D-oxy LNA.

[0289] In yet other embodiments, an alternating flank ASO has contiguous nucleotides comprising an alternating sequence of LNA and DNA nucleoside units, 5′-3′, selected from the group consisting of: 2-3-2-8-2, 1-1-2-1-1-9-2, 3-10-1-1-2, 3-9-1-2-2, 3-8-1-3-2, 3-8-1-1- 1-1-2, 3-1-1-9-3, 3-1-1-8-1-1-2, 4-9-1-1-2, 4-8-1-2-2, 3-3-1-8-2, 3-2-1-9-2, 3-2-2-8-2, 3-2-2-7-3, 5-7-1-2-2, 1-1-3-10-2, 1-1-3-7-1-2-2, 1-1-4-9-2, 2-1-3-9-2, 3-1-1-10-2, 3-1-1-7-1-2-2, 3-1-2-9-2, 4-7-1-3-2, 5-9-1-1-2, 4-10-1-1-2, 3-11-1-1-2, 2-1-1-10-1-1-2, 1-1-3-9-1-1-2, 3-10-1-2-2, 3-9-1-3-2, 3-8-1-1-1-2-2, 4-9-1-2-2, 4-9-1-1-3, 4-8-1-3-2, 4-8-1-2-3, 4-8-1-1-1-1-2, 4-7-1-2-1-1-2, 4-7-1-1-1-2-2, 2- 1-2-11-2, 2-1-3-8-1-1-2, 3-1-1-11-2, 3-1-1-9-1-1-2, 3-1-1-8-1-2-2, 3-1-1-7-1-1-1-1-2, 4-9-2-1-2, 4-7- 1-3-3, 5-9-1-1-3, 5-9-1-2-2, 4-10-2-1-2, 4-10-1-1-3, 4-10-1-2-2, 3-11-2-1-2, 3-11-1-1-3, 5-9-2-1-2, 3-11-1- 2-2, 2-1-2-9-1-2-2, 3-1-1-10-1-1-2, 3-1-1-9-1-2-2, 4-9-1-1-1-1-2, 4-8-2-1-1-1-2, 1-1-3-10-2-1-2, 2-1-2-10-2-1-2, 2-1-1-12-4, 2-2-1-11-4, 3-1-1-11-4, 2-1-1-13-3, 2-1-2-11-4, 2-2-1-12-3, 3-11-1-2-3, 3-1- 1-12-3, 2-1-2-12-3, 4-11-2-1-2, 4-10-2-2-2, 3-2-1-9-1-1-3, 2-2-1-1-1-9-4, 2-2-2-9-1-1-3, 3-1-1-9-1-1-1-1-2, 2-1-2-9-1-2-3, 3-1-1-10-1-1-3, 2-1-1-2-1-9-4, 4-9-1-1-1-2-2, 3-1-1-9-1-2-3, 2-1-1-1-1-10-4, 2-1-2-10-1-1-3, 2-1-1-1-1-9-2-1-2, 2-2-2-9-2-1-2, 4-9-1-2-1-1-2, 3-2-1-9-2-1-2, 2-1-2-9-2-2-2, 2-1-1-1-1-9-1-1-3, 3-1-1-9-2-2-2, 2-2-2-10-4, 2-1-2-9-1-1-1-1-2, 4-10-1-2-3, 3-2-1-10-4, 3-1-1-10-2-1-2, 4-10-1-1-1-1-2, 4-11-1-1-3, 3-12-4, 1-2-2-10-1-1-3, and 2-2-2-10-1-1-2; wherein the first numeral represents an number of LNA units, the next a number of DNA units, and alternating LNA and DNA regions thereafter.

[0290] In other embodiments, the ASOs of the disclosure are represented as any one of ASO numbers selected from FIGS. 1A to 1C and 2.

### II.H. Internucleotide Linkages

[0291] The monomers of the ASOs described herein are coupled together via linkage groups. Suitably, each monomer is linked to the 3′ adjacent monomer via a linkage group.

[0292] The person having ordinary skill in the art would understand that, in the context of the present disclosure, the 5′ monomer at the end of an ASO does not comprise a 5′ linkage group, although it may or may not comprise a 5′ terminal group.

[0293] The terms “linkage group” and “internucleotide linkage” are intended to mean a group capable of covalently coupling together two nucleotides. Specific and preferred examples include phosphate groups and phosphorothioate groups.

[0294] The nucleotides of the ASO of the disclosure or contiguous nucleotides sequence thereof are coupled together via linkage groups. Suitably each nucleotide is linked to the 3′ adjacent nucleotide via a linkage group.

[0295] Suitable internucleotide linkages include those listed within WO2007/031091, for example the internucleotide linkages listed on the first paragraph of page 34 of WO2007/031091 (hereby incorporated by reference in its entirety).

[0296] Examples of suitable internucleotide linkages that can be used with the disclosure include phosphodiester linkage (PO or subscript o), a phosphotriester linkage, a methylphosphonate linkage, a phosphoramidate linkage, a phosphorothioate linkage (PS or subscript s), and combinations thereof.

[0297] It is, in some embodiments, preferred to modify the internucleotide linkage from its normal phosphodiester to one that is more resistant to nuclease attack, such as phosphorothioate or boranophosphate—these two, being cleavable by RNaseH, also allow that route of antisense inhibition in reducing the expression of the target gene.

[0298] Suitable sulphur (S) containing internucleotide linkages as provided herein may be preferred. Phosphorothioate internucleotide linkages are also preferred, particularly for the gap region (B) of gapmers. Phosphorothioate linkages can also be used for the flanking regions (A and C, and for linking A or C to D, and within region D, as appropriate).

[0299] Regions A, B and C, can, however, comprise internucleotide linkages other than phosphorothioate, such as phosphodiester linkages, particularly, for instance when the use of nucleotide analogues protects the internucleotide linkages within regions A and C from endo-nuclease degradation—such as when regions A and C comprise LNA nucleotides.

[0300] The internucleotide linkages in the ASO can be phosphodiester, phosphorothioate or boranophosphate so as to allow RNaseH cleavage of targeted RNA. Phosphorothioate is preferred for improved nuclease resistance and other reasons, such as ease of manufacture.

[0301] In some embodiments, the internucleotide linkages comprise one or more stereo-defined internucleotide linkages (e.g., such as stereo-defined modified phosphate linkages, e.g., phosphodiester, phosphorothioate, or boranophosphate linkages with a defined stereochemical structure). The term “stereo-defined internucleotide linkage” is used interchangeably with “chirally controlled internucleotide linkage” and refers to a internucleotide linkage in which the stereochemical designation of the phosphorus atom is controlled such that a specific amount of Rₚ or Sₚ of the internucleotide linkage is present within an ASO strand. The stereochemical designation of a chiral linkage can be defined (controlled) by, for example, asymmetric synthesis.

[0302] An ASO having at least one stereo-defined internucleotide linkage can be called as a stereo-defined ASO, which includes both a fully stereo-defined ASO and a partially stereo-defined ASO.

[0303] In some embodiments, an ASO is fully stereo-defined. A fully stereo-defined ASO refers to an ASO sequence having a defined chiral center (Rₚ or Sₚ) in each internucleotide linkage in the ASO. In some embodiments, an ASO is partially stereo-defined. A partially stereo-defined ASO refers to an ASO sequence having a defined chiral center (Rₚ or Sₚ) in at least one internucleotide linkage, but not in all of the internucleotide linkages. Therefore, a partially stereo-defined ASO can include linkages that are achiral or stereo-nondefined in addition to the at least one stereo-defined linkage. When an internucleotide linkage in an ASO is stereo-defined, the desired configuration, either Rₚ or Sₚ, is present in at least 10%, at least 20%, at least 30%, at least 40%, at least 50%, at least 55%, at least 60%, at least 65%, at least 70%, at least 75%, at least 80%, at least 85%, at least 90%, at least 91%, at least 92%, at least 93%, at least 94%, at least 95%, at least 96%, at least 97%, at least 98%, at least 99%, or essentially 100% of the ASO.

[0304] In one aspect of the ASO of the disclosure, the nucleotides and/or nucleotide analogues are linked to each other by means of phosphorothioate groups. With the oligonucleotides of the invention it is advantageous to use phosphorothioate internucleoside linkages.

[0305] Phosphorothioate internucleoside linkages are particularly useful due to nuclease resistance, beneficial pharmacokinetics and ease of manufacture. In some embodiments at least 50% of the internucleoside linkages in the oligonucleotide, or contiguous nucleotide sequence thereof, are phosphorothioate, such as at least 60%, such as at least 70%, such as at least 75%, such as at least 80% or such as at least 90% of the internucleoside linkages in the oligonucleotide, or contiguous nucleotide sequence thereof, are phosphorothioate. In some embodiments all of the internucleoside linkages of the oligonucleotide, or contiguous nucleotide sequence thereof, are phosphorothioate.

[0306] It is recognized that the inclusion of phosphodiester linkages, such as one or two linkages, into an otherwise phosphorothioate ASO, particularly between or adjacent to nucleotide analogue units (typically in region A and or C) can modify the bioavailability and/or bio-distribution of an ASO—see WO2008/113832, hereby incorporated by reference.

[0307] In some embodiments, such as the embodiments referred to above, where suitable and not specifically indicated, all remaining linkage groups are either phosphodiester or phosphorothioate, or a mixture thereof.

[0308] In some embodiments, the oligonucleotide of the invention comprises both phosphorothioate internucleoside linkages and at least one phosphodiester linkage, such as 2, 3 or 4 phosphodiester linkages, in addition to the phosphorodithioate linkage(s). In a gapmer oligonucleotide, phosphodiester linkages, when present, are suitably not located between contiguous DNA nucleosides in the gap region G.

[0309] In some embodiments all the internucleotide linkage groups are phosphorothioate.

[0310] When referring to specific gapmer oligonucleotide sequences, such as those provided herein it will be understood that, in various embodiments, when the linkages are phosphorothioate linkages, alternative linkages, such as those disclosed herein can be used, for example phosphate (phosphodiester) linkages can be used, particularly for linkages between nucleotide analogues, such as LNA, units. Likewise, when referring to specific gapmer oligonucleotide sequences, such as those provided herein, when the C residues are annotated as 5-′methyl modified cytosine, in various embodiments, one or more of the Cs present in the ASO can be unmodified C residues.

[0311] US Publication No. 2011/0130441, which was published Jun. 2, 2011 and is incorporated by reference herein in its entirety, refers to ASO compounds having at least one bicyclic nucleoside attached to the 3′ or 5′ termini by a neutral internucleoside linkage. The ASOs of the disclosure can therefore have at least one bicyclic nucleoside attached to the 3′ or 5′ termini by a neutral internucleoside linkage, such as one or more phosphotriester, methylphosphonate, MMI (3′-CH₂—N(CH₃)—O—5′), amide-3 (3′-CH₂—C(═O)—N(H)-5′), formacetal (3′-O—CH₂—O—5′) or thioformacetal (3′-S—CH₂—O—5′). The remaining linkages can be phosphorothioate.

[0312] In some embodiments, the ASOs of the disclosure have internucleotide linkages described in FIGS. 1A to 1C and 2. As used herein, e.g., FIGS. 1A to 1C and 2, phosphorothioate linkages are indicated as “s”, and phosphorodiester linkages are indicated by the absence of “s”.

### II.1. Conjugates

[0313] The term conjugate as used herein refers to an oligonucleotide which is covalently linked to a non-nucleotide moiety (conjugate moiety or region C or third region).

[0314] Conjugation of the oligonucleotide of the disclosure to one or more non-nucleotide moieties may improve the pharmacology of the oligonucleotide, e.g. by affecting the activity, cellular distribution, cellular uptake or stability of the oligonucleotide. In some embodiments the conjugate moiety modify or enhance the pharmacokinetic properties of the oligonucleotide by improving cellular distribution, bioavailability, metabolism, excretion, permeability, and/or cellular uptake of the oligonucleotide. In particular the conjugate may target the oligonucleotide to a specific organ, tissue or cell type and thereby enhance the effectiveness of the oligonucleotide in that organ, tissue or cell type. At the same time the conjugate may serve to reduce activity of the oligonucleotide in non-target cell types, tissues or organs, e.g., off target activity or activity in non-target cell types, tissues or organs. WO 93/07883 and WO2013/033230 provides suitable conjugate moieties. Further suitable conjugate moieties are those capable of binding to the asialoglycoprotein receptor (ASGPr). In particular tri-valent N-acetylgalactosamine conjugate moieties are suitable for binding to the ASGPr, see for example WO 2014/076196, WO 2014/207232, and WO 2014/179620.

[0315] Oligonucleotide conjugates and their synthesis has also been reported in comprehensive reviews by Manoharan in Antisense Drug Technology, Principles, Strategies, and Applications, S. T. Crooke, ed., Ch. 16, Marcel Dekker, Inc., 2001 and Manoharan, Antisense and Nucleic Acid Drug Development, 2002, 12, 103.

[0316] In an embodiment, the non-nucleotide moiety (conjugate moiety) is selected from the group consisting of carbohydrates (e.g. GalNAc), cell surface receptor ligands, drug substances, hormones, lipophilic substances, polymers, proteins, peptides, toxins (e.g. bacterial toxins), vitamins, viral proteins (e.g. capsids), and combinations thereof.

[0317] In some embodiments, the conjugate is an antibody or an antibody fragment which has a specific affinity for a transferrin receptor, for example as disclosed in WO 2012/143379 herby incorporated by reference. In some embodiments the non-nucleotide moiety is an antibody or antibody fragment, such as an antibody or antibody fragment that facilitates delivery across the blood-brain-barrier, in particular an antibody or antibody fragment targeting the transferrin receptor.

### II.J. Activated ASOs

[0318] The term “activated ASO,” as used herein, refers to an ASO of the disclosure that is covalently linked (i.e., functionalized) to at least one functional moiety that permits covalent linkage of the ASO to one or more conjugated moieties, i.e., moieties that are not themselves nucleic acids or monomers, to form the conjugates herein described. Typically, a functional moiety will comprise a chemical group that is capable of covalently bonding to the ASO via, e.g., a 3′-hydroxyl group or the exocyclic NH₂ group of the adenine base, a spacer that can be hydrophilic and a terminal group that is capable of binding to a conjugated moiety (e.g., an amino, sulfhydryl or hydroxyl group). In some embodiments, this terminal group is not protected, e.g., is an NH₂ group. In other embodiments, the terminal group is protected, for example, by any suitable protecting group such as those described in “Protective Groups in Organic Synthesis” by Theodora W Greene and Peter G M Wuts, 3rd edition (John Wiley & Sons, 1999).

[0319] In some embodiments, ASOs of the disclosure are functionalized at the 5′ end in order to allow covalent attachment of the conjugated moiety to the 5′ end of the ASO. In other embodiments, ASOs of the disclosure can be functionalized at the 3′ end. In still other embodiments, ASOs of the disclosure can be functionalized along the backbone or on the heterocyclic base moiety. In yet other embodiments, ASOs of the disclosure can be functionalized at more than one position independently selected from the 5′ end, the 3′ end, the backbone, and the base.

[0320] In some embodiments, activated ASOs of the disclosure are synthesized by incorporating during the synthesis one or more monomers that is covalently attached to a functional moiety. In other embodiments, activated ASOs of the disclosure are synthesized with monomers that have not been functionalized, and the ASO is functionalized upon completion of synthesis.

### III. Pharmaceutical Compositions and Administration Routes

[0321] The ASO of the disclosure can be used in pharmaceutical formulations and compositions. Suitably, such compositions comprise a pharmaceutically acceptable diluent, carrier, salt, or adjuvant.

[0322] The ASO of the disclosure can be included in a unit formulation such as in a pharmaceutically acceptable carrier or diluent in an amount sufficient to deliver to a patient a therapeutically effective amount without causing serious side effects in the treated patient. However, in some forms of therapy, serious side effects may be acceptable in terms of ensuring a positive outcome to the therapeutic treatment.

[0323] The formulated drug may comprise pharmaceutically acceptable binding agents and adjuvants. Capsules, tablets, or pills can contain for example the following compounds: microcrystalline cellulose, gum or gelatin as binders; starch or lactose as excipients; stearates as lubricants; various sweetening or flavoring agents. For capsules the dosage unit may contain a liquid carrier like fatty oils. Likewise, coatings of sugar or enteric agents may be part of the dosage unit. The oligonucleotide formulations can also be emulsions of the active pharmaceutical ingredients and a lipid forming a micellular emulsion.

[0324] The pharmaceutical compositions of the present disclosure can be administered in a number of ways depending upon whether local or systemic treatment is desired and upon the area to be treated. Administration can be (a) oral (b) pulmonary, e.g., by inhalation or insufflation of powders or aerosols, including by nebulizer; intratracheal, intranasal, (c) topical including epidermal, transdermal, ophthalmic and to mucous membranes including vaginal and rectal delivery; or (d) parenteral including intravenous, intraarterial, subcutaneous, intraperitoneal or intramuscular injection or infusion; or intracranial, e.g., intrathecal, intra-cerebroventricular, intravitrea or intraventricular, administration. In one embodiment the ASO is administered IV, IP, orally, topically or as a bolus injection or administered directly in to the target organ. In another embodiment, the ASO is administered intrathecal or intra-cerebroventricular as a bolus injection.

[0325] Pharmaceutical compositions and formulations for topical administration can include transdermal patches, ointments, lotions, creams, gels, drops, sprays, suppositories, liquids and powders.

[0326] Conventional pharmaceutical carriers, aqueous, powder or oily bases, thickeners and the like may be necessary or desirable. Examples of topical formulations include those in which the ASO of the disclosure are in admixture with a topical delivery agent such as lipids, liposomes, fatty acids, fatty acid esters, steroids, chelating agents and surfactants. Compositions and formulations for oral administration include but are not limited to powders or granules, microparticulates, nanoparticulates, suspensions or solutions in water or non-aqueous media, capsules, gel capsules, sachets, tablets or minitablets. Compositions and formulations for parenteral, intrathecal, intra-cerebroventricular, or intraventricular administration can include sterile aqueous solutions which can also contain buffers, diluents and other suitable additives such as, but not limited to, penetration enhancers, carrier compounds and other pharmaceutically acceptable carriers or excipients.

[0327] Pharmaceutical compositions of the present disclosure include, but are not limited to, solutions, emulsions, and liposome-containing formulations. These compositions may be generated from a variety of components that include, but are not limited to, preformed liquids, self-emulsifying solids and self-emulsifying semisolids. Delivery of drug to the target tissue can be enhanced by carrier-mediated delivery including, but not limited to, cationic liposomes, cyclodextrins, porphyrin derivatives, branched chain dendrimers, polyethylenimine polymers, nanoparticles and microspheres (Dass C R. J Pharm Pharmacol 2002; 54(1):3-27).

[0328] The pharmaceutical formulations of the present disclosure, which can conveniently be presented in unit dosage form, can be prepared according to conventional techniques well known in the pharmaceutical industry. Such techniques include the step of bringing into association the active ingredients with the pharmaceutical carrier(s) or excipient(s). In general, the formulations are prepared by uniformly and intimately bringing into association the active ingredients with liquid carriers or finely divided solid carriers or both, and then, if necessary, shaping the product.

[0329] For parenteral, subcutaneous, intradermal or topical administration the formulation can include a sterile diluent, buffers, regulators of tonicity and antibacterials. The active ASOs can be prepared with carriers that protect against degradation or immediate elimination from the body, including implants or microcapsules with controlled release properties. For intravenous administration the carriers can be physiological saline or phosphate buffered saline. International Publication No. WO2007/031091 (A2), published Mar. 22, 2007, further provides suitable pharmaceutically acceptable diluent, carrier and adjuvants—which are hereby incorporated by reference.

[0330] The invention also provides for the use of the oligonucleotide or oligonucleotide conjugate of the invention as described for the manufacture of a medicament wherein the medicament is in a dosage form for intrathecal or intra-cerebroventricular administration.

### IV. Diagnostics

[0331] This disclosure further provides a diagnostic method useful during diagnosis of SNCA related diseases, e.g., a synucleinopathy. Non-limiting examples of synucleinopathy include, but are not limited to, Parkinson's disease, Parkinson's Disease Dementia (PDD), dementia with Lewy bodies, and multiple system atrophy.

[0332] The ASOs of the disclosure can be used to measure expression of SNCA transcript in a tissue or body fluid from an individual and comparing the measured expression level with a standard SNCA transcript expression level in normal tissue or body fluid, whereby an increase in the expression level compared to the standard is indicative of a disorder treatable by an ASO of the disclosure.

[0333] The ASOs of the disclosure can be used to assay SNCA transcript levels in a biological sample using any methods known to those of skill in the art. (Touboul et. al., Anticancer Res. (2002) 22 (6A): 3349-56; Verjout et. al., Mutat. Res. (2000) 640: 127-38); Stowe et. al., J. Virol. Methods (1998) 75 (1): 93-91).

[0334] By “biological sample” is intended any biological sample obtained from an individual, cell line, tissue culture, or other source of cells potentially expressing SNCA transcript. Methods for obtaining tissue biopsies and body fluids from mammals are well known in the art.

### V. Kits Comprising ASOs

[0335] This disclosure further provides kits that comprise an ASO of the disclosure described herein and that can be used to perform the methods described herein. In certain embodiments, a kit comprises at least one ASO in one or more containers. In some embodiments, the kits contain all of the components necessary and/or sufficient to perform a detection assay, including all controls, directions for performing assays, and any necessary software for analysis and presentation of results. One skilled in the art will readily recognize that the disclosed ASO can be readily incorporated into one of the established kit formats which are well known in the art.

### VI. Methods of Using

[0336] The ASOs of the disclosure can be utilized for therapeutics and prophylaxis.

[0337] SNCA is a 140 amino acid protein preferentially expressed in neurons at pre-synaptic terminals where it is thought to play a role in regulating synaptic transmission. It has been proposed to exist natively as both an unfolded monomer and as a stable tetramer of α-helices and has been shown to undergo several posttranslational modifications. One modification that has been extensively studied is phosphorylation of SNCA at amino acid serine 129 (S129). Normally, only a small percentage of SNCA is constitutively phosphorylated at S129 (pS129), whereas the vast majority of SNCA found in pathological intracellular inclusions is pS129 SNCA. These pathological inclusions consist of aggregated, insoluble accumulations of misfolded SNCA proteins and are a characteristic feature of a group of neurodegenerative diseases collectively known as synucleinopathies.

[0338] In synucleinopathies, SNCA can form pathological aggregates in neurons known as Lewy bodies, which are characteristic of both Parkinson's Disease (PD), Parkinson's Disease Dementia (PDD), and dementia with Lewy bodies (DLB). The present ASOs therefore can reduce the number of the SNCA pathological aggregates or prevent formation of the SNCA pathological aggregates. Additionally, abnormal SNCA-rich lesions called glial cytoplasmic inclusions (GCIs) are found in oligodendrocytes, and represent the hallmark of a rapidly progressing, fatal synucleinopathy known as multiple systems atrophy (MSA). In some embodiments, the ASOs of the disclosure reduce the number of GCIs or prevent formation of GCIs. Reports of either undetectable or low levels of SNCA mRNA expression in oligodendrocytes suggest that some pathological form of SNCA is propagated from neurons, where it is highly expressed, to oligodendrocytes. In certain embodiments, the ASOs of the disclosure reduce or prevent propagation of SNCA, e.g., pathological form of SNCA, from neurons.

[0339] The ASOs can be used in research, e.g., to specifically inhibit the synthesis of SNCA protein (typically by degrading or inhibiting the mRNA and thereby prevent protein formation) in cells and experimental animals thereby facilitating functional analysis of the target or an appraisal of its usefulness as a target for therapeutic intervention. Further provided are methods of down-regulating the expression of SNCA mRNA and/or SNCA protein in cells or tissues comprising contacting the cells or tissues, in vitro or in vivo, with an effective amount of one or more of the ASOs, conjugates, or compositions of the disclosure.

[0340] For therapeutics, an animal or a human, suspected of having a disease or disorder, which can be treated by modulating the expression of SNCA transcript and/or SNCA protein is treated by administering ASO compounds in accordance with this disclosure. Further provided are methods of treating a mammal, such as treating a human, suspected of having or being prone to a disease or condition, associated with expression of SNCA transcript and/or SNCA protein by administering a therapeutically or prophylactically effective amount of one or more of the ASOs or compositions of the disclosure. The ASO, a conjugate, or a pharmaceutical composition according to the disclosure is typically administered in an effective amount. In some embodiments, the ASO or conjugate of the disclosure is used in therapy.

[0341] The disclosure further provides for an ASO according to the disclosure, for use in treating one or more of the diseases referred to herein, such as a disease selected from the group consisting of Parkinson's disease, Parkinson's Disease Dementia (PDD), dementia with Lewy bodies, multiple system atrophy, and any combinations thereof.

[0342] The disclosure further provides for a method for treating α-synucleinopathies, the method comprising administering an effective amount of one or more ASOs, conjugates, or pharmaceutical compositions thereof to an animal in need thereof (such as a patient in need thereof).

[0343] In certain embodiments, the disease, disorder, or condition is associated with overexpression of SNCA gene transcript and/or SNCA protein.

[0344] The disclosure also provides for methods of inhibiting (e.g., by reducing) the expression of SNCA gene transcript and/or SNCA protein in a cell or a tissue, the method comprising contacting the cell or tissue, in vitro or in vivo, with an effective amount of one or more ASOs, conjugates, or pharmaceutical compositions thereof, of the disclosure to affect degradation of expression of SNCA gene transcript thereby reducing SNCA protein.

[0345] In certain embodiments, the ASOs are used to reduce the expression of SNCA mRNA in one or more sections of brain, e.g., hippocampus, brainstem, striatum, or any combinations thereof. In other embodiments, the ASOs reduce the expression of SNCA mRNA, e.g., in brain stem and/or striatum, less than 70%, less than 60%, less than 50%, less than 40%, less than 30%, less than 20%, less than 10%, or less than 5% compared to the SNCA mRNA expression after administration of or exposure to a vehicle (no ASO), at day 3, day 5, day 7, day 10, day 14, day 15, day 20, day 21, or day 25. In some embodiments, the expression of SNCA mRNA is maintained below 70%, below 60%, below 50%, below 40%, below 30%, below 20%, below 10%, or below 5% compared to the SNCA mRNA expression after administration of or exposure to a vehicle (no ASO) until day 28, day 30, day 32, day 35, day 40, day 42, day 45, day 49, day 50, day 56, day 60, day 63, day 70, or day 75.

[0346] In other embodiments, the ASOs of the present disclosure reduces SNCA mRNA and/or SNCA protein expression in medulla, caudate putamen, pons cerebellum, lumbar spinal cord, frontal cortex, and/or any combinations thereof.

[0347] The disclosure also provides for the use of the ASO or conjugate of the disclosure as described for the manufacture of a medicament. The disclosure also provides for a composition comprising the ASO or conjugate thereof for use in treating a disorder as referred to herein, or for a method of the treatment of as a disorder as referred to herein. The present disclosure also provides ASOs or conjugates for use in therapy. The present disclosure additionally provides ASOs or conjugates for use in the treatment of synucleinopathy.

[0348] The disclosure further provides for a method for inhibiting SNCA protein in a cell which is expressing SNCA comprising administering an ASO or a conjugate according to the disclosure to the cell so as to affect the inhibition of SNCA protein in the cell.

[0349] The disclosure includes a method of reducing, ameliorating, preventing, or treating neuronal hyperexcitability in a subject in need thereof comprising administering an ASO or a conjugate according to the disclosure.

[0350] The disclosure also provides for a method for treating a disorder as referred to herein the method comprising administering an ASO or a conjugate according to the disclosure as herein described and/or a pharmaceutical composition according to the disclosure to a patient in need thereof.

[0351] The ASOs and other compositions according to the disclosure can be used for the treatment of conditions associated with over expression or expression of mutated version of SNCA protein.

[0352] The disclosure provides for the ASO or the conjugate according to disclosure, for use as a medicament, such as for the treatment of α-Synucleinopathies. In some embodiments the α-Synucleinopathy is a disease selected from the group consisting of Parkinson's disease, Parkinson's Disease Dementia (PDD), dementia with Lewy bodies, multiple system atrophy, and any combinations thereof.

[0353] The disclosure further provides use of an ASO of the disclosure in the manufacture of a medicament for the treatment of a disease, disorder or condition as referred to herein. In some embodiments, the ASO or conjugate of the disclosure is used for the manufacture of a medicament for the treatment of a α-Synucleinopathy, a seizure disorder, or a combination thereof.

[0354] Generally stated, one aspect of the disclosure is directed to a method of treating a mammal suffering from or susceptible to conditions associated with abnormal levels of SNCA i.e., a α-synucleinopathy), comprising administering to the mammal and therapeutically effective amount of an ASO targeted to SNCA transcript that comprises one or more LNA units. The ASO, a conjugate or a pharmaceutical composition according to the disclosure is typically administered in an effective amount.

[0355] In some embodiments, the oligonucleotide, oligonucleotide conjugate or pharmaceutical composition of the invention is administered at a dose of 0.1-15 mg/kg, such as from 0.2-10 mg/kg, such as from 0.25-5 mg/kg. The administration can be once a week, every 2^{nd} week, every third week or even once a month.

[0356] The disease or disorder, as referred to herein, can, in some embodiments be associated with a mutation in the SNCA gene or a gene whose protein product is associated with or interacts with SNCA protein. Therefore, in some embodiments, the target mRNA is a mutated form of the SNCA sequence.

[0357] An interesting aspect of the disclosure is directed to the use of an ASO (compound) as defined herein or a conjugate as defined herein for the preparation of a medicament for the treatment of a disease, disorder, or condition as referred to herein.

[0358] The methods of the disclosure can be employed for treatment or prophylaxis against diseases caused by abnormal levels of SNCA protein. In some embodiments, diseases caused by abnormal levels of SNCA protein are α-synucleinopathies. In certain embodiments, α-synucleinopathies include Parkinson's disease, Parkinson's Disease Dementia (PDD), dementia with Lewy bodies, and multiple system atrophy.

[0359] Alternatively stated, in some embodiments, the disclosure is furthermore directed to a method for treating abnormal levels of SNCA protein, the method comprising administering an ASO of the disclosure, or a conjugate of the disclosure, or a pharmaceutical composition of the disclosure to a patient in need thereof.

[0360] The disclosure also relates to an ASO, a composition, or a conjugate as defined herein for use as a medicament.

[0361] The disclosure further relates to use of a compound, composition, or a conjugate as defined herein for the manufacture of a medicament for the treatment of abnormal levels of SNCA protein or expression of mutant forms of SNCA protein (such as allelic variants, such as those associated with one of the diseases referred to herein).

[0362] A patient who is in need of treatment is a patient suffering from or likely to suffer from the disease or disorder.

[0363] The practice of the present disclosure will employ, unless otherwise indicated, conventional techniques of cell biology, cell culture, molecular biology, transgenic biology, microbiology, recombinant DNA, and immunology, which are within the skill of the art. Such techniques are explained fully in the literature. See, for example, Sambrook et al., ed. (1989) Molecular Cloning A Laboratory Manual (2nd ed.; Cold Spring Harbor Laboratory Press); Sambrook et al., ed. (1992) Molecular Cloning: A Laboratory Manual, (Cold Springs Harbor Laboratory, NY); D. N. Glover ed., (1985) DNA Cloning, Volumes I and II; Gait, ed. (1984) Oligonucleotide Synthesis; Mullis et al. U.S. Pat. No. 4,683,195; Hames and Higgins, eds. (1984) Nucleic Acid Hybridization; Hames and Higgins, eds. (1984) Transcription And Translation; Freshney (1987) Culture Of Animal Cells (Alan R. Liss, Inc.); Immobilized Cells And Enzymes (IRL Press) (1986); Perbal (1984) A Practical Guide To Molecular Cloning; the treatise, Methods In Enzymology (Academic Press, Inc., N.Y.); Miller and Calos eds. (1987) Gene Transfer Vectors For Mammalian Cells, (Cold Spring Harbor Laboratory); Wu et al., eds., Methods In Enzymology, Vols. 154 and 155; Mayer and Walker, eds. (1987) Immunochemical Methods In Cell And Molecular Biology (Academic Press, London); Weir and Blackwell, eds., (1986) Handbook Of Experimental Immunology, Volumes I-IV; Manipulating the Mouse Embryo, Cold Spring Harbor Laboratory Press, Cold Spring Harbor, N.Y., (1986);); Crooke, Antisense drug Technology: Principles, Strategies and Applications, 2^{nd} Ed. CRC Press (2007) and in Ausubel et al. (1989) Current Protocols in Molecular Biology (John Wiley and Sons, Baltimore, Md.).

[0364] All of the references cited above, as well as all references cited herein, are incorporated herein by reference in their entireties.

### EMBODIMENTS

[0365] 1. An antisense oligonucleotide comprising a contiguous nucleotide sequence of 10 to 30 nucleotides in length that is complementary to a nucleic acid sequence within an alpha-synuclein (SNCA) transcript, wherein the nucleic acid sequence is selected from the group consisting of (i) nucleotides 4942-5343 of SEQ ID NO: 1; (ii) nucleotides 6326-7041 of SEQ ID NO: 1; (iia) nucleotides 6336-7041 of SEQ ID NO: 1; (iii) nucleotides 7329-7600 of SEQ ID NO: 1; (iv) nucleotides 7630-7783 of SEQ ID NO: 1; (iva) nucleotides 7750-7783 of SEQ ID NO: 1; (v) nucleotides 8277-8501 of SEQ ID NO: 1; (vi) nucleotides 9034-9526 of SEQ ID NO: 1; (vii) nucleotides 9982-14279 of SEQ ID NO: 1; (viii) nucleotides 15204-19041 of SEQ ID NO: 1; (ix) nucleotides 20351-29654 of SEQ ID NO: 1; (ixa) nucleotides 20351-20908 of SEQ ID NO: 1; (ixb) nucleotides 21052-29654 of SEQ ID NO: 1; (x) nucleotides 30931-33938 of SEQ ID NO: 1; (xi) nucleotides 34932-37077 of SEQ ID NO: 1; (xii) nucleotides 38081-42869 of SEQ ID NO: 1; (xiii) nucleotides 44640-44861 of SEQ ID NO: 1; (xiv) nucleotides 46173-46920 of SEQ ID NO: 1; (xv) nucleotides 47924-58752 of SEQ ID NO: 1; (xvi) nucleotides 60678-60905 of SEQ ID NO: 1; (xvii) nucleotides 62066-62397 of SEQ ID NO: 1; (xviii) nucleotides 67759-71625 of SEQ ID NO: 1; (xix) nucleotides 72926-86991 of SEQ ID NO: 1; (xx) nucleotides 88168-93783 of SEQ ID NO: 1; (xxi) nucleotides 94976-102573 of SEQ ID NO: 1; (xxii) nucleotides 104920-107438 of SEQ ID NO: 1; (xxiii) nucleotides 108948-119285 of SEQ ID NO: 1; (xxiiia) nucleotides 108948-114019 of SEQ ID NO: 1; (xxiib) nucleotides 114292-116636 of SEQ ID NO: 1; (xxiv) nucleotides 131-678 of SEQ ID NO: 5; (xxv) nucleotides 131-348 of SEQ ID NO: 3; (xxvi) nucleotides 1-162 of SEQ ID NO: 4; (xxvii) nucleotides 126-352 of SEQ ID NO: 2; (xxviii) nucleotides 276-537 of SEQ ID NO: 2; (xxix) nucleotides 461-681 of SEQ ID NO: 2; and (xxx) nucleotides 541-766 of SEQ ID NO: 2.
[0366] 2. The antisense oligonucleotide of embodiment 1, wherein the nucleic acid sequence is selected from the group consisting of (i) nucleotides 4992-5109 of SEQ ID NO: 1; (ii) nucleotides 6376-6991 of SEQ ID NO: 1; (iii) nucleotides 7379-7600 of SEQ ID NO: 1; (iv) nucleotides 7630-7733 of SEQ ID NO: 1; (v) nucleotides 8327-8451 of SEQ ID NO: 1; (vi) nucleotides 9084-9476 of SEQ ID NO: 1; (vii) nucleotides 10032-14229 of SEQ ID NO: 1; (viii) nucleotides 15254-18991 of SEQ ID NO: 1; (ix) nucleotides 20401-29604 of SEQ ID NO: 1; (x) nucleotides 30981-33888 of SEQ ID NO: 1; (xi) nucleotides 34982-37027 of SEQ ID NO: 1; (xii) nucleotides 38131-42819 of SEQ ID NO: 1; (xiii) nucleotides 44690-44811 of SEQ ID NO: 1; (xiv) nucleotides 46223-46870 of SEQ ID NO: 1; (xv) nucleotides 47974-58702 of SEQ ID NO: 1; (xvi) nucleotides 60728-608555 of SEQ ID NO: 1; (xvii) nucleotides 62116-62347 of SEQ ID NO: 1; (xviii) nucleotides 67809-71575 of SEQ ID NO: 1; (xix) nucleotides 72976-86941 of SEQ ID NO: 1; (xx) nucleotides 88218-93733 of SEQ ID NO: 1; (xxi) nucleotides 95026-102523 of SEQ ID NO: 1; (xxii) nucleotides 104970-107388 of SEQ ID NO: 1; (xxiii) nucleotides 108998-119235 of SEQ ID NO: 1; (xxiv) nucleotides 181-628 of SEQ ID NO: 5; (xxv) nucleotides 181-298 of SEQ ID NO: 3; (xxvi) nucleotides 15-112 of SEQ ID NO: 4; (xxvii) nucleotides 176-302 of SEQ ID NO: 2; (xxviii) nucleotides 326-487 of SEQ ID NO: 2; (xxix) nucleotides 511-631 of SEQ ID NO: 2; and (xxx) nucleotides 591-716 of SEQ ID NO: 2.
[0367] 3. The antisense oligonucleotide of embodiment 1, wherein the nucleic acid sequence is selected from the group consisting of (i) nucleotides 5042-5243 of SEQ ID NO: 1; (ii) nucleotides 6426-6941 of SEQ ID NO: 1; (iii) nucleotides 7429-7600 of SEQ ID NO: 1; (iv) nucleotides 7630-7683 of SEQ ID NO: 1; (v) nucleotides 8377-8401 of SEQ ID NO: 1; (vi) nucleotides 9134-9426 of SEQ ID NO: 1; (vii) nucleotides 10082-14179 of SEQ ID NO: 1; (viii) nucleotides 15304-18941 of SEQ ID NO: 1; (ix) nucleotides 20451-29554 of SEQ ID NO: 1; (x) nucleotides 31031-33838 of SEQ ID NO: 1; (xi) nucleotides 35032-36977 of SEQ ID NO: 1; (xii) nucleotides 38181-42769 of SEQ ID NO: 1; (xiii) nucleotides 44740-44761 of SEQ ID NO: 1; (xiv) nucleotides 46273-46820 of SEQ ID NO: 1; (xv) nucleotides 48024-58752 of SEQ ID NO: 1; (xvi) nucleotides 60778-60805 of SEQ ID NO: 1; (xvii) nucleotides 62166-62297 of SEQ ID NO: 1; (xviii) nucleotides 67859-71525 of SEQ ID NO: 1; (xix) nucleotides 73026-86891 of SEQ ID NO: 1; (xx) nucleotides 88268-93683 of SEQ ID NO: 1; (xxi) nucleotides 95076-102473 of SEQ ID NO: 1; (xxii) nucleotides 105020-107338 of SEQ ID NO: 1; (xxiii) nucleotides 109048-119185 of SEQ ID NO: 1; (xxiv) nucleotides 231-248 or 563-578 of SEQ ID NO: 5; (xxv) nucleotides 231-248 of SEQ ID NO: 3; (xxvi) nucleotides 38-62 of SEQ ID NO: 4; (xxvii) nucleotides 226-252 of SEQ ID NO: 2; (xxviii) nucleotides 376-437 of SEQ ID NO: 2; (xxix) nucleotides 561-581 of SEQ ID NO: 2; and (xxx) nucleotides 641-666 of SEQ ID NO: 2.
[0368] 4. The antisense oligonucleotide of embodiment 1, wherein the nucleic acid sequence corresponds to nucleotides nucleotides 21052-29654 of SEQ ID NO: 1; nucleotides 30931-33938 of SEQ ID NO: 1; nucleotides 44640-44861 of SEQ ID NO: 1; or nucleotides 47924-58752 of SEQ ID NO: 1.
[0369] 5. The antisense oligonucleotide of embodiment 1 or 4, wherein the nucleic acid sequence corresponds to nucleotides 24483-28791 of SEQ ID NO: 1; nucleotides 32225-32245 of SEQ ID NO: 1; nucleotides 44740-44760 of SEQ ID NO: 1 or nucleotides 48640-48660 of SEQ ID NO: 1.
[0370] 6. The antisense oligonucleotide of embodiment 1, wherein the nucleic acid sequence corresponds to (i) nucleotides 7502-7600 of SEQ ID NO: 1; (ii) nucleotides 7630-7719 of SEQ ID NO: 1; (iii) nucleotides 116881-117312 of SEQ ID NO: 1; or (iv) nucleotides 118606-118825 of SEQ ID NO: 1.
[0371] 7. The antisense oligonucleotide of embodiment 1 or 6, wherein the nucleic acid sequence is nucleotides 116881-117119 of SEQ ID NO: 1; nucleotides 116968-117198 of SEQ ID NO: 1; or nucleotides 117085-117312 of SEQ ID NO: 1.
[0372] 8. The antisense oligonucleotide of embodiment 1, 6 or 7 wherein the nucleic acid sequence is nucleotides (i) nucleotides 7552-7600 of SEQ ID NO: 1; (ii) nucleotides 7630-7669 of SEQ ID NO: 1; (iii) nucleotides 116931-117262 of SEQ ID NO: 1; or (iv) nucleotides 118656-118775 of SEQ ID NO: 1.
[0373] 9. The antisense oligonucleotide of embodiment 8, wherein the nucleic acid sequence is nucleotides 116931-117069 of SEQ ID NO: 1; nucleotides 117018-117148 of SEQ ID NO: 1; or nucleotides 117135-117262 of SEQ ID NO: 1.
[0374] 10. The antisense oligonucleotide of embodiment 1, wherein the nucleic acid sequence is nucleotides (i) nucleotides 116981-117212 of SEQ ID NO: 1 or (ii) nucleotides 118706-118725 of SEQ ID NO: 1.
[0375] 11. The antisense oligonucleotide of embodiment 10, wherein the nucleic acid sequence is nucleotides 116981-117019 of SEQ ID NO: 1; nucleotides 117068-117098 of SEQ ID NO: 1; or nucleotides 117185-117212 of SEQ ID NO: 1.
[0376] 12. The antisense oligonucleotide of any one of embodiments 1 to 11, which has from 10 to 24 nucleotides in length or from 14 to 21 nucleotides in length.
[0377] 13. The antisense oligonucleotide of any one of embodiments 1 to 12, which has 14, 15, 16, 17, 18, 19, 20, or 21 nucleotides in length.
[0378] 14. The antisense oligonucleotide of any one of embodiments 1 to 13, wherein the SNCA transcript comprises SEQ ID NO: 1.
[0379] 15. The antisense oligonucleotide of any one of embodiments 1 to 14, wherein the contiguous nucleotide sequence comprises SEQ ID NO: 7 to SEQ ID NO: 1878 with one, two, three, or four mismatches.
[0380] 16. The antisense oligonucleotide of any one of embodiments 1 to 15, wherein the contiguous nucleotide sequence comprises SEQ ID NO: 7 to SEQ ID NO: 1878.
[0381] 17. The antisense oligonucleotide of embodiment 1 or 4, wherein the contiguous nucleotide sequence comprises a sequence selected from SEQ ID NO: 7 to SEQ ID NO: 1302 or SEQ ID NO: 1309-1353 with no more than 2 mismatches.
[0382] 18. The antisense oligonucleotide of embodiment 1 or 17, wherein the contiguous nucleotide sequence consists of a sequence selected from SEQ ID NO: 7 to SEQ ID NO: 1302 or SEQ ID NO: 1309-1353.
[0383] 19. The antisense oligonucleotide of any one of embodiments 1, 4, 5, 11-18, wherein the contiguous nucleotide sequence comprises a sequence selected from the group consisting of SEQ ID NO: 276; 278; 296; 295; 325; 328; 326; 329; 330; 327; 332; 333; 331; 339; 341; 390; 522 and 559.
[0384] 20. The antisense oligonucleotide of any one of embodiments 1 to 19, wherein the antisense oligonucleotide is capable of inhibiting the expression of the human SNCA transcript in a cell which is expressing the human SNCA transcript.
[0385] 21. The antisense oligonucleotide of any of embodiments 1 to 20, wherein the contiguous nucleotide sequence comprises at least one nucleotide analogueue.
[0386] 22. The antisense oligonucleotide of any of embodiment 21, wherein the nucleotide analogue is a 2′ sugar modified nucleoside.
[0387] 23. The method of embodiment 22, wherein the 2′ sugar modified nucleoside is an affinity enhancing sugar modified nucleoside.
[0388] 24. The antisense oligonucleotide of any one of embodiments 1 to 23, which is a gapmer.
[0389] 25. The antisense oligonucleotide of embodiment 24, which is an alternating flank gapmer.
[0390] 26. The antisense oligonucleotide of embodiment 24 or 25, which comprises the formula of 5′-A-B-C-3′, wherein
   [0391] a) region B is a contiguous sequence of at least 6 DNA units, which are capable of recruiting RNase;
   [0392] a) region A is a first wing sequence of 1 to 10 nucleotides, wherein the first wing sequence comprises one or more nucleotide analogues and optionally one or more DNA units and wherein at least one of the nucleotide analogues is located at the 3′ end of A; and
   [0393] a) region C is a second wing sequence of 1 to 10 nucleotides, wherein the second wing sequence comprises one or more nucleotide analogues and optionally one or more DNA units and wherein at least one of the nucleotide analogues is located at the 5′ end of C.
[0394] 27. The antisense oligonucleotide of embodiment 26, wherein region A comprises 1-4 nucleotide analogues, region B consist of 8 to 15 DNA units and region C comprises 2 to 4 nucleotide analogues.
[0395] 28. The antisense oligonucleotide of embodiment 26 or 27, wherein region A comprises a combination of nucleotide analogues and DNA unit selected from (i) 1-9 nucleotide analogues and 1 DNA unit; (ii) 1-8 nucleotide analogues and 1-2 DNA units; (iii) 1-7 nucleotide analogues and 1-3 DNA units; (iv) 1-6 nucleotide analogues and 1-4 DNA units; (v) 1-5 nucleotide analogues and 1-5 DNA units; (vi) 1-4 nucleotide analogues and 1-6 DNA units; (vii) 1-3 nucleotide analogues and 1-7 DNA units; (viii) 1-2 nucleotide analogues and 1-8 DNA units; and (ix) 1 nucleotide analogue and 1-9 DNA units.
[0396] 29. The antisense oligonucleotide of embodiment 26 or 27, wherein region C comprises a combination of nucleotide analogues and DNA unit selected from (i) 1-9 nucleotide analogues and 1 DNA unit; (ii) 1-8 nucleotide analogues and 1-2 DNA units; (iii) 1-7 nucleotide analogues and 1-3 DNA units; (iv) 1-6 nucleotide analogues and 1-4 DNA units; (v) 1-5 nucleotide analogues and 1-5 DNA units; (vi) 1-4 nucleotide analogues and 1-6 DNA units; (vii) 1-3 nucleotide analogues and 1-7 DNA units; (viii) 1-2 nucleotide analogues and 1-8 DNA units; and (ix) 1 nucleotide analogue and 1-9 DNA units.
[0397] 30. The antisense oligonucleotide of any one of embodiments 26 to 29, wherein region A is a first wing design selected from any ASOs in FIGS. 1A to 1C and 2, and/or region C is a second wing design selected from any ASOs in FIGS. 1A to 1C and 2, wherein the upper letter is a nucleoside analog and the lower letter is a DNA.
[0398] 31. The antisense oligonucleotide of any one of embodiments 1 to 30, which comprises at least two, at least three, at least four, at least five, at least six, at least seven, at least eight, at least nine, or at least ten nucleotide analogues.
[0399] 32. The antisense oligonucleotide of any one of embodiments 21 to 31, wherein the nucleotide analogue or analogues are independently selected from one or more 2′ sugar modified nucleosides selected from the group consisting of Locked Nucleic Acid (LNA); 2′—O-alkyl-RNA; 2′-amino-DNA; 2′-fluoro-DNA; arabino nucleic acid (ANA); 2′-fluoro-ANA, hexitol nucleic acid (HNA), intercalating nucleic acid (INA), constrained ethyl nucleoside (cEt), 2′—O-methyl nucleic acid (2′—OMe), 2′—O-methoxyethyl nucleic acid (2′-MOE), and any combination thereof.
[0400] 33. The antisense oligonucleotide of any one of embodiments 1 to 32, wherein the nucleotide analogue or analogues comprise a bicyclic sugar.
[0401] 34. The antisense oligonucleotide of embodiment 33, wherein the bicyclic sugar comprises cEt, 2′,4′-constrained 2′—O-methoxyethyl (cMOE), α-L-LNA, β-D-LNA, 2′-0,4′-C-ethylene-bridged nucleic acids (ENA), amino-LNA, oxy-LNA, or thio-LNA.
[0402] 35. The antisense oligonucleotide of any one of embodiments 21 to 34, wherein the nucleotide analogue or analogues comprise a β-D-oxy-LNA.
[0403] 36. The antisense oligonucleotide of any one of embodiments 21 to 35, wherein the antisense oligonucleotide comprises one or more 5′methyl cytosine nucleobases.
[0404] 37. The antisense oligonucleotide of any one of embodiments 24 to 36, which comprises two to five LNAs on the 5′ region of the antisense oligonucleotide.
[0405] 38. The antisense oligonucleotide of any one of embodiments 24 to 37, which comprises two to five LNAs on the 3′ region of the antisense oligonucleotide.
[0406] 39. The antisense oligonucleotide of any one of embodiments 1 to 38, which comprises an internucleoside linkage selected from: a phosphodiester linkage, a phosphotriester linkage, a methylphosphonate linkage, a phosphoramidate linkage, a phosphorothioate linkage, and combinations thereof.
[0407] 40. The antisense oligonucleotide of any one of embodiments 1 to 39, wherein 50% of the internucleoside linkages within the contiguous nucleotide sequence are phosphorothioate internucleoside linkages.
[0408] 41. The antisense oligonucleotide of any one of embodiments 1 to 40, wherein the internucleoside linkage comprises one or more stereodefined, modified phosphate linkages.
[0409] 42. The antisense oligonucleotide of any one of embodiments 1 to 40, wherein all the internucleoside linkages in the contiguous nucleotide sequence are phosphorothioate.
[0410] 43. The antisense oligonucleotide of any one of embodiments 1 to 42, wherein the antisense oligonucleotide has an in vivo tolerability less than or equal to a total score of 4, wherein the total score is the sum of a unit score of five categories, which are 1) hyperactivity; 2) decreased activity and arousal; 3) motor dysfunction and/or ataxia; 4) abnormal posture and breathing; and 5) tremor and/or convulsions, and wherein the unit score for each category is measured on a scale of 0-4.
[0411] 44. The antisense oligonucleotide of embodiment 43, wherein the in vivo tolerability is less than or equal to the total score of 3, the total score of 2, the total score of 1, or the total score of 0.
[0412] 45. The antisense oligonucleotide of any one of embodiments 1 to 44, which reduces expression of SNCA mRNA in a cell by at least about 20%, at least about 30%, at least about 40%, at least about 50%, at least about 60%, at least about 70%, at least about 80%, at least about 90%, or about 100% compared to a cell not exposed to the antisense oligonucleotide.
[0413] 46. The antisense oligonucleotide of any one of embodiments 1 to 45, which reduces expression of SNCA protein in a cell by at least about 60%, at least about 70%, at least about 80%, at least about 90%, or at least about 95% compared to a cell not exposed to the antisense oligonucleotide.
[0414] 47. The antisense oligonucleotide of any one embodiments 1 to 46, which comprises the nucleotides A, T, C, and G and at least one analogue of the nucleotides A, T, C, and G, and has a sequence score greater than or equal to 0.2, wherein the sequence score is calculated by formula I:

$$\frac{\begin{matrix}\# of C nucleotides and analogues thereof - \\ \# of G nucleotides and analogues thereof\end{matrix}}{Total nucleotide length} . \qquad ( I )$$

[0415] 48. The antisense oligonucleotide of embodiment 1 to 47, wherein the nucleotide sequence comprises, consists essentially of, or consists of a sequence selected from the group consisting of SEQ ID NOs: 7 to 1878 with a design selected from the group consisting of the designs in FIGS. 1A to 1C and 2, wherein the upper case letter is a sugar modified nucleoside and the lower case letter is DNA.
[0416] 49. The antisense oligonucleotide of embodiment 37, wherein the nucleotide sequence comprises, consists essentially of, or consists of SEQ ID NO: 1436 with the design of ASO—003092 and SEQ ID NO: 1547 with the design of ASO—003179. wherein the upper case letter is a nucleoside analogue and the lower case letter is DNA.
[0417] 50. The antisense oligonucleotide of embodiment 1 to, 48 wherein the nucleotide sequence comprises, consists essentially of, or consists of a sequence selected from the group consisting of wherein the contiguous nucleotide sequence consists of a sequence selected from SEQ ID NO: 7 to SEQ ID NO: 1302 or SEQ ID NO: 1309-1353 with a design selected from the group consisting of the designs in FIGS. 1A to 1C, wherein the upper case letter is a sugar modified nucleoside and the lower case letter is DNA.
[0418] 51. The antisense oligonucleotide of embodiment 50, wherein the contiguous nucleotide sequence comprises a sequence selected from the group consisting of with a design selected from the group consisting of:

(SEQ ID NO: 276)
TTCtctatataacatCACT
(SEQ ID NO: 278)
TTTCtctatataacaTCAC;
(SEQ ID NO: 296)
AACTtttacataccACAT;
(SEQ ID NO: 295)
AACTtttacataccaCATT;
(SEQ ID NO: 325)
ATTAttcatcacaatCCA;
(SEQ ID NO: 328)
ATTAttcatcacaATCC;
(SEQ ID NO: 326)
CattattcatcacaaTCCA;
(SEQ ID NO: 329)
CATtattcatcacaATCC;
(SEQ ID NO: 330)
ACAttattcatcacaaTCC;
(SEQ ID NO: 327)
AcattattcatcacaaTCCA;
(SEQ ID NO: 332)
ACATtattcatcacAATC;
(SEQ ID NO: 333)
TACAttattcatcacAATC;
(SEQ ID NO: 331)
TAcattattcatcacaaTCC;
(SEQ ID NO: 339)
TTCaacatttttatttCACA;
(SEQ ID NO: 341)
ATTCaacatttttattTCAC;
(SEQ ID NO: 390)
ACTAtgatacttcACTC;
(SEQ ID NO: 522)
ACACattaactactCATA
and
(SEQ ID NO: 559)
GTCAaaatattcttaCTTC,

[0419] wherein the upper case letters indicate a sugar modified nucleoside analouge and the lower case letters indicate DNAs.
[0420] 52. The antisense oligonucleotide of any one of embodiments 1 to 48, wherein the nucleotide sequence comprises, consists essentially of, or consists of a sequence selected from the group consisting of SEQ ID NOs: 7 to 1878 with the corresponding chemical structure in FIGS. 1A to 1C and 2.
[0421] 53. The antisense oligonucleotide of any one of embodiment 1 to 52, wherein the contiguous nucleotide sequence has a the chemical structure of ASO—003092 or ASO—003179.
[0422] 54. The antisense oligonucleotide of any one of claims one of embodiment 1 to 52, wherein the contiguous nucleotide sequence has a the chemical structure selected from the group consisting of ASO—008387; ASO—008388; ASO—008501; ASO—008502; ASO—008529; ASO—008530; ASO—008531; ASO—008532; ASO—008533; ASO—008534; ASO—008535; ASO—008536; ASO—008537; ASO—008543; ASO—008545; ASO—008584; ASO—008226 and ASO—008261.
[0423] 55. A conjugate comprising the antisense oligonucleotide of any one of embodiments 1 to 53, wherein the antisense oligonucleotide is covalently attached to at least one non-nucleotide or non-polynucleotide moiety.
[0424] 56. The conjugate of embodiment 55, wherein the non-nucleotide or non-polynucleotide moiety comprises a protein, a fatty acid chain, a sugar residue, a glycoprotein, a polymer, or any combinations thereof.
[0425] 57. The conjugate of embodiment 55, wherein the conjugate is an antibody fragment which has a specific affinity for a transferrin receptor.
[0426] 58. A pharmaceutical composition comprising the antisense oligonucleotide of any one embodiments 1 to 57 or the conjugate of embodiment 55 to 57, and a pharmaceutically acceptable carrier.
[0427] 59. The composition of embodiment 58, which further comprises a therapeutic agent.
[0428] 60. The composition of embodiment 59, wherein the therapeutic agent is an alpha-synuclein antagonist.
[0429] 61. The composition of embodiment 60, wherein the alpha-synuclein antagonist is an anti-alpha-synuclein antibody or fragment thereof.
[0430] 62. A kit comprising the antisense oligonucleotide of any one embodiments 1 to 57 or the conjugate of embodiment 55 to 57, or the composition of any one of embodiments 58 to 61, and instructions for use.
[0431] 63. A diagnostic kit comprising the antisense oligonucleotide of any one embodiments 1 to 57 or the conjugate of embodiment 55 to 57, or the composition of any one of embodiments 58 to
[0432] 61, and instructions for use.
[0433] 64. A method of inhibiting or reducing SNCA protein expression in a cell, the method comprising administering the antisense oligonucleotide of any one embodiments 1 to 57 or the conjugate of embodiment 55 to 57, or the composition of any one of embodiments 58 to 61 to the cell expressing SNCA protein, wherein the SNCA protein expression in the cell is inhibited or reduced after the administration.
[0434] 65. The method of embodiment 64 wherein the antisense oligonucleotide inhibits or reduces expression of SNCA mRNA in the cell after the administration.
[0435] 66. The method of embodiment 64 or 65, wherein the expression of SNCA mRNA is reduced by at least about 20%, at least about 30%, at least about 40%, at least about 50%, at least about 60%, at least about 70%, at least about 80%, at least about 90%, or about 100% after the administration compared to a cell not exposed to the antisense oligonucleotide.
[0436] 67. The method of any one of embodiments 64 to 66, wherein the antisense oligonucleotide reduces expression of SNCA protein in the cell after the administration by at least about 60%, at least about 70%, at least about 80%, or at least about 90% compared to a cell not exposed to the antisense oligonucleotide.
[0437] 68. The method of any one of embodiments 64 to 67, wherein the cell is a neuron.
[0438] 69. A method for treating a synucleinopathy in a subject in need thereof, comprising administering an effective amount of the antisense oligonucleotide of any one embodiments 1 to 57 or the conjugate of embodiment 55 to 57, or the composition of any one of embodiments 58 to 61 to the subject.
[0439] 70. Use of the antisense oligonucleotide of any one embodiments 1 to 57 or the conjugate of embodiment 55 to 57, or the composition of any one of embodiments 58 to 61 for the manufacture of a medicament.
[0440] 71. Use of the antisense oligonucleotide of any one embodiments 1 to 57 or the conjugate of embodiment 55 to 57, or the composition of any one of embodiments 58 to 61 for the manufacture of a medicament for the treatment of a synucleinopathy in a subject in need thereof.
[0441] 72. The antisense oligonucleotide of any one of embodiments 1 to 57 or the conjugate of embodiment 55 to 57, or the composition of any one of embodiments 58 to 61 for use in therapy.
[0442] 73. The antisense oligonucleotide of any one embodiments 1 to 57 or the conjugate of embodiment 55 to 57, or the composition of any one of embodiments 58 to 61 for use in therapy of a synucleinopathy in a subject in need thereof.
[0443] 74. The method of embodiment 64 to 69, the use of embodiment 70 or 71, or the antisense oligonucleotide for use of embodiment 72 or 73, wherein the synucleinopathy is selected from the group consisting of Parkinson's disease, Parkinson's Disease Dementia (PDD), multiple system atrophy, dementia with Lewy bodies, and any combinations thereof.
[0444] 75. The method of embodiment 64 to 69, the use of embodiment 70 or 71, or the antisense oligonucleotide for use of embodiment 72 or 73, wherein the subject is a human.
[0445] 76. The method of any one of embodiments 64 to 69, the use of embodiment 70 or 71, or the antisense oligonucleotide for use of embodiment 72 or 73, wherein the antisense oligonucleotide, the conjugate, or the composition is administered orally, parenterally, intrathecally, intra-cerebroventricularly, pulmorarily, topically, or intraventricularly.
[0446] 77. The antisense oligonucleotide of any one embodiments 1 to 57 or the conjugate of embodiment 55 to 57, or the composition of any one of embodiments 58 to 61, the kit of embodiment 62 or 63, the method of any one of embodiments 64 to 69, the use of embodiment 70 or 71, or the antisense oligonucleotide for use of embodiment 72 or 73, wherein the nucleotide analogue comprises a sugar modified nucleoside.
[0447] 78. The method of embodiment 64, wherein the sugar modified nucleoside is an affinity enhancing sugar modified nucleoside.

### EXAMPLES

[0448] The following examples are offered by way of illustration and not by way of limitation.

### Example 1: Construction of ASOs

[0449] Antisense oligonucleotides described herein were designed to target various regions in the SNCA pre-mRNA as shown in SEQ ID NO: 1 (genomic SNCA sequence), or in SNCA cDNA as shown in SEQ ID NO: 2, 3, 4 and 5. For example, the ASOs were constructed to target the regions denoted using the pre-mRNA start site and pre-mRNA end site of NG_011851.1 (SEQ ID NO: 1) and/or mRNA start site and end site of its mRNAs. The exemplary sequences of the ASOs (e.g., SEQ ID Numbers) are described in FIGS. 1A to 1C and 2. In some embodiments, the ASOs were designed to be gapmers or alternating flank gapmers. See DES Numbers.

[0450] FIGS. 1A to 1C and 2 show non-limiting examples of the ASO design for selected sequences. The same methods can be applied to any other sequences disclosed herein. The gapmers were constructed to contain locked nucleic acids—LNAs (upper case letters). For example, a gapmer can have Beta-D-oxy LNA at the 5′ end and the 3′ end and have a phosphorothioate backbone. But the LNAs can also be substituted with any other nucleotide analogues and the backbone can be other types of backbones (e.g., a phosphodiester linkage, a phosphotriester linkage, a methylphosphonate linkage, a phosphoramidate linkage, or combinations thereof).

[0451] The ASOs were synthesized using methods well known in the art. Exemplary methods of preparing such ASOs are described in Barciszewski et al., Chapter 10—“Locked Nucleic Acid Aptamers” in Nucleic Acid and Peptide Aptamers: Methods and Protocols, vol. 535, Gunter Mayer (ed.) (2009), the entire contents of which is hereby expressly incorporated by reference herein.

### Example 2A: High Content Assay to Measure Reduction of SNCA Protein in Primary Neurons

[0452] ASOs targeting SNCA were tested for their ability to reduce SNCA protein expression in primary mouse neurons. The primary neuronal cultures were established from the forebrain of PAC-Tg(SNCA^{A53T})+/+;SNCA^{-/-} (“PAC-A53T”) mice carrying the entire human SNCA gene with a A53T mutation on a mouse SNCA knockout background. See Kuo Y et al., Hum Mol Genet., 19: 1633-50 (2010). All procedures involving mice were conducted according to Animal Test Methods (ATM) approved by the Bristol-Myers Squibb Animal Care and Use Committee (ACUC). Primary neurons were generated by papain digestion according to manufacturer's protocol (Worthington Biochemical Corporation, LK0031050). Isolated neurons were washed and resuspended in Neurobasal medium (NBM, Invitrogen) supplemented with B27 (Gibco), 1.25 μM Glutamax (Gibco), 100 unit/ml penicillin, 100 μg/ml streptomycin, and 25 μg/ml Amphotericin B.

[0453] Cells were plated on multi-well poly D-Lysine coated plates at 5,400 cells/cm² (for example in 384 well plates 6,000 cells/well in 25 μl NBM). ASOs were diluted in water and added to the cells at DIV01 (i.e., 1 day post plating). ASOs were added to 2× final concentration in medium then delivered to cells manually. Alternatively, ASOs in water were dispensed using a Labcyte ECHO acoustic dispenser. For ECHO dispense, 250 nl of ASO in water was added to cells in medium followed by the addition of an equal volume aliquot of fresh aliquot of NBM. For primary screening, the ASOs were added to final concentrations of 5 μM, 3.3 μM, 1 μM, 200 nM, or 40 nM. For potency determination, 8-10 point titrations of the ASOs were prepared from 0.75 mM stock then delivered to cultured cells for a final concentration range of 2.7-4000 nM or 4.5-10,000 nM. ASO—000010 (TCTgtcttggctTTG, SEQ ID NO: 1879) and ASO—000838 (AGAaataagtggtAGT, SEQ ID NO: 1404) (5 μM) were included in each plate as reference control inhibitors for tubulin and SNCA, respectively. The cells were incubated with the ASOs for 14 days to achieve steady state reduction of mRNA.

[0454] After the 14-day incubation, the cells were fixed by the addition of fixative to final concentrations of 4% formaldehyde (J. T. Baker) and 4% sucrose (Sigma) in the wells. The cells were fixed for 15 minutes, and then, the fixative aspirated from the wells. Then, the cells were permeabilized for 20 minutes with a phosphate buffered saline (PBS) solution containing 0.3% Triton-X 100 and 3% bovine serum albumin (BSA) or 3% Normal goat serum Afterwards, the permeabilization buffer was aspirated from the wells, and the cells were washed once with PBS. The primary antibodies were then diluted in PBS containing 0.1% Triton X-100 and 3% BSA. Dilutions of 1:1000 of rabbit anti-SNCA (Abcam) and 1:500 of chicken anti-tubulin (Abcam) were used. Cells were incubated with the primary antibodies between 2 hours to overnight. Following the incubation, the primary antibody staining solution was aspirated, and the cells were washed 2-times with PBS. A secondary staining solution containing 1:500 dilution of goat-anti-chicken Alexa 567 antibody, goat anti-rabbit-Alexa 488 antibody, and Hoechst (10 μg/ml) in PBS containing 0.1% Triton X-100 with 3% BSA was added to the wells, and the plates were incubated for 1 hour. Afterwards, the secondary staining solution was aspirated from the wells, and the cells were washed 3-times with PBS. After washing the cells, 60 μl of PBS was added to each well. Plates were then stored in the PBS until imaging.

[0455] For imaging, the plates were scanned on a Thermo-Fisher (Cellomics) CX5 imager using the Spot Detector bio-application (Cellomics) to quantify nuclei (Hoechst stain, Channel 1), tubulin extensions (Alexa 567, channel 2) and SNCA (Alexa 488, channel 3). Object count (nuclei) was monitored but not published to the database. The total area covered by tubulin was quantified as the feature SpotTotalAreaCh2 and total intensity of staining for SNCA quantified as SpotTotalIntenCh3. The tubulin measure was included to monitor toxicity. To determine the reduction of SNCA protein, the ratio of SNCA intensity to the tubulin staining area was calculated and results normalized as % inhibition median using the median of vehicle treated wells as total and ASO—000010 or ASO—000838 wells as maximally inhibited wells for tubulin or SNCA, respectively. The results are shown in Table 1, 2 and 3 below.

[0456] Table 1 shows the percent reduction of SNCA protein expression in both a human neuroblastoma cell line SK-N-BE(2) (“SK cells”) and primary neurons isolated from A53T-PAC transgenic mice (“PAC neurons”) after in vitro culture with various ASOs from FIG. 1A to 1C. The cultivation of the PAC neurons is described in Example 2A and Example 2E describes the cultivation of the the SK cells. For the SK cells, the cells were treated with 25 μM of ASO and the SNCA mRNA expression (normalized to GAPDH) is shown as a percent of the control. For the PAC neurons, the cells were treated with either 40 nM or 5 μM of ASO and the SNCA protein expression (normalized to tubulin) is shown as percent inhibition. Where no value is provided, the particular ASO was not tested under the particular conditions.

| | SK cells | PAC neuron | PAC neuron |
|---|---|---|---|
| | asyn/GAPDH | asyn/tub | aysn/tub |
| | % inhb | % inh | % Inh |
| ASO_NO | @25 uM | @40 nM | @5 uM |
| 000838 | | | 93.72 |
| 000871 | | 76.92 | |
| 000944 | | 93.71 | |
| 001215 | | | 87.53 |
| 001216 | | | 70.23 |
| 001217 | | | 78.61 |
| 001218 | | | 44.15 |
| 001219 | | | 74.23 |
| 001220 | | | 45.19 |
| 001221 | | | 88.01 |
| 001222 | | | 89.32 |
| 001223 | | | 97.25 |
| 001224 | | | 81.80 |
| 001225 | | | 87.39 |
| 001226 | | | 89.46 |
| 001227 | | | 82.60 |
| 001228 | | | 92.13 |
| 001229 | | | 38.57 |
| 001230 | | | 64.61 |
| 001231 | | | 85.90 |
| 001232 | | | 97.52 |
| 001233 | | | 92.56 |
| 001234 | | | 71.25 |
| 001235 | | | 98.36 |
| 001236 | | | 95.77 |
| 001237 | | | 63.04 |
| 001238 | | | 89.50 |
| 001239 | | | 80.33 |
| 001240 | | | 90.26 |
| 001241 | | | 82.99 |
| 001242 | | | 86.40 |
| 001243 | | | 98.53 |
| 001244 | | | 95.88 |
| 001245 | | | 93.77 |
| 001246 | | | 90.82 |
| 001247 | | | 97.48 |
| 001248 | | | 93.67 |
| 001249 | | | 47.69 |
| 001250 | | | 81.30 |
| 001251 | | | 92.94 |
| 001252 | | | 65.16 |
| 001253 | | | 78.95 |
| 001254 | | | 90.36 |
| 001256 | | | 98.12 |
| 001257 | | | 68.58 |
| 001258 | | | 98.61 |
| 001259 | | | 98.39 |
| 001260 | | | 48.29 |
| 001261 | | | 92.53 |
| 001262 | | | 11.86 |
| 001264 | | | 88.31 |
| 001265 | | | 78.33 |
| 001266 | | | 91.34 |
| 001267 | | | 55.49 |
| 001268 | 35.33 | | 95.85 |
| 001269 | | | 89.81 |
| 001270 | | | 97.29 |
| 001271 | | | 86.95 |
| 001272 | | | 44.51 |
| 001273 | | | 93.30 |
| 001274 | | | 91.42 |
| 001275 | | | 88.46 |
| 001276 | | | 74.14 |
| 001277 | | | 84.41 |
| 001278 | | | 87.79 |
| 001279 | | | 97.27 |
| 001280 | | | 83.63 |
| 001281 | | | 97.32 |
| 001282 | | | 94.25 |
| 001283 | | | 31.00 |
| 001284 | | | 93.18 |
| 001285 | | | 86.10 |
| 001286 | | | 80.62 |
| 001287 | | | 23.11 |
| 001288 | | | 67.56 |
| 001289 | | | 86.74 |
| 001290 | | | 66.46 |
| 001291 | | | 85.76 |
| 001292 | | | 92.26 |
| 001293 | | | 93.32 |
| 001294 | | | 64.02 |
| 001295 | | | 94.93 |
| 001296 | | | 90.24 |
| 001297 | | | 86.81 |
| 001298 | | | 91.01 |
| 001299 | | | 65.65 |
| 001300 | | | 94.40 |
| 001301 | | | 92.02 |
| 001302 | | | 92.69 |
| 001303 | | | 95.62 |
| 001304 | | | 98.14 |
| 001305 | | | 48.41 |
| 001306 | | | 98.79 |
| 001307 | | | 84.65 |
| 001308 | | | 93.86 |
| 001309 | | | 90.91 |
| 001310 | | | 84.82 |
| 001311 | | | 84.94 |
| 001312 | | | 95.91 |
| 001313 | | | 61.41 |
| 001314 | | | 42.39 |
| 001315 | | | 91.32 |
| 001316 | | | 87.26 |
| 001317 | | | 60.85 |
| 001318 | | | 95.84 |
| 001319 | | | 8.18 |
| 001320 | | | 85.45 |
| 001321 | | | 69.37 |
| 001322 | | | 28.55 |
| 001323 | | | 87.84 |
| 001324 | | | 92.81 |
| 001325 | | | 77.19 |
| 001326 | | | 94.59 |
| 001327 | | | 82.85 |
| 001328 | | | 95.78 |
| 001329 | | | 0.00 |
| 001330 | | | 85.68 |
| 001331 | | | 86.34 |
| 001332 | | | 95.33 |
| 001333 | | | 55.39 |
| 001334 | | | 86.33 |
| 001335 | | | 92.50 |
| 001336 | | | 57.28 |
| 001337 | | | 77.14 |
| 001338 | | | 89.06 |
| 001339 | | | 91.57 |
| 001340 | | | 67.34 |
| 001341 | | | 78.26 |
| 001342 | | | 86.73 |
| 001343 | | | 83.45 |
| 001344 | | | 88.15 |
| 001345 | | | 85.47 |
| 001346 | | | 81.85 |
| 001347 | | | 84.87 |
| 001348 | | | 84.06 |
| 001349 | | | 89.69 |
| 001350 | | | 87.68 |
| 001351 | | | 8.05 |
| 001352 | | | 73.26 |
| 001353 | | | 40.01 |
| 001354 | | | 93.23 |
| 001355 | | | 89.69 |
| 001356 | | | 91.26 |
| 001357 | | | 89.88 |
| 001358 | | | 43.68 |
| 001359 | | | 88.47 |
| 001360 | | | 94.42 |
| 001361 | | | 88.15 |
| 001362 | | | 93.42 |
| 001363 | | | 87.88 |
| 001364 | | | 68.99 |
| 001365 | | | 95.09 |
| 001366 | | | 95.58 |
| 001367 | | | 86.95 |
| 001368 | | | 96.18 |
| 001369 | | | 91.02 |
| 001370 | | | 70.67 |
| 001371 | | | 66.13 |
| 001372 | | | 72.71 |
| 001373 | | | 90.13 |
| 001374 | | | 92.72 |
| 001375 | | | 93.58 |
| 001376 | | | 85.61 |
| 001377 | | | 71.01 |
| 001378 | | | 0.00 |
| 001379 | | | 27.03 |
| 001380 | | | 88.23 |
| 001381 | | | 95.05 |
| 001382 | | | 90.04 |
| 001383 | | | 93.92 |
| 001384 | | | 91.73 |
| 001385 | | | 80.17 |
| 001386 | | | 16.10 |
| 001387 | | | 47.37 |
| 001388 | | | 4.30 |
| 001389 | | | 82.65 |
| 001390 | | | 95.66 |
| 001391 | | | 86.09 |
| 001392 | | | 86.25 |
| 001393 | | | 84.71 |
| 001394 | | | 85.67 |
| 001395 | | 37.01 | 82.51 |
| 001396 | | | 11.64 |
| 001397 | | | 70.48 |
| 001398 | | | 92.61 |
| 001399 | | | 87.04 |
| 001400 | | | 89.92 |
| 001401 | | | 89.29 |
| 001402 | | | 89.30 |
| 001403 | | | 83.13 |
| 001404 | | | 56.75 |
| 001405 | | | 87.46 |
| 001406 | | | 96.31 |
| 001407 | | | 83.56 |
| 001408 | | | 92.38 |
| 001409 | | | 87.22 |
| 001410 | | | 75.54 |
| 001411 | | | 0.00 |
| 001413 | | | 89.97 |
| 001414 | | | 83.35 |
| 001415 | | | 92.07 |
| 001416 | | | 81.65 |
| 001417 | | | 66.39 |
| 001418 | | | 91.34 |
| 001419 | | | 95.97 |
| 001420 | | | 89.45 |
| 001422 | | | 26.41 |
| 001423 | | | 89.46 |
| 001424 | | | 75.68 |
| 001425 | | | 84.24 |
| 001426 | | | 78.65 |
| 001427 | | | 86.02 |
| 001428 | | | 87.14 |
| 001429 | | | 79.78 |
| 001430 | | | 95.27 |
| 001431 | | | 84.42 |
| 001432 | | | 12.51 |
| 001433 | | | 89.85 |
| 001434 | | | 86.60 |
| 001436 | | | 90.20 |
| 001437 | | | 82.67 |
| 001438 | | | 64.18 |
| 001439 | | | 84.32 |
| 001440 | | | 94.46 |
| 001441 | | | 94.20 |
| 001442 | | | 95.66 |
| 001443 | | | 87.32 |
| 001444 | | | 86.51 |
| 001445 | | | 88.60 |
| 001446 | | | 90.39 |
| 001447 | | | 82.04 |
| 001448 | | | 92.17 |
| 001449 | | | 60.30 |
| 001450 | | | 96.45 |
| 001451 | | | 84.72 |
| 001452 | | | 92.90 |
| 001453 | | | 84.30 |
| 001454 | | | 83.64 |
| 001455 | | | 89.70 |
| 001456 | | | 88.28 |
| 001457 | | | 79.27 |
| 001458 | | | 96.77 |
| 001459 | | | 85.61 |
| 001460 | | | 84.09 |
| 001461 | | | 56.21 |
| 001462 | | | 90.67 |
| 001463 | | | 90.19 |
| 001465 | | | 84.33 |
| 001466 | | | 92.61 |
| 001467 | | | 88.34 |
| 001468 | | | 89.59 |
| 001469 | | | 87.01 |
| 001470 | | | 94.90 |
| 001471 | | | 94.17 |
| 001472 | | | 76.82 |
| 001473 | | | 86.75 |
| 001474 | | | 79.57 |
| 001475 | | | 86.00 |
| 001476 | | | 71.74 |
| 001477 | | | 89.83 |
| 001478 | | | 81.05 |
| 001479 | | | 89.33 |
| 001480 | | | 93.81 |
| 001481 | | | 95.98 |
| 001482 | | | 93.95 |
| 001483 | | | 73.67 |
| 001484 | | | 90.45 |
| 001485 | | | 83.78 |
| 001486 | | | 89.29 |
| 001487 | | | 88.97 |
| 001488 | | | 0.00 |
| 001489 | | | 95.56 |
| 001491 | | | 97.87 |
| 001492 | | | 95.49 |
| 001493 | | | 98.56 |
| 001494 | | | 96.76 |
| 001495 | | | 97.27 |
| 001496 | | | 99.04 |
| 001497 | | | 93.76 |
| 001498 | | | 97.76 |
| 001499 | | | 96.59 |
| 001500 | | | 86.77 |
| 001501 | | | 98.74 |
| 001502 | | | 98.16 |
| 001503 | | | 95.86 |
| 001504 | | | 93.12 |
| 001505 | | | 94.71 |
| 001506 | | | 97.09 |
| 001507 | | | 95.03 |
| 001508 | | | 98.47 |
| 001509 | | | 98.00 |
| 001510 | | | 98.78 |
| 001511 | | | 98.15 |
| 001512 | | | 97.94 |
| 001513 | | | 98.42 |
| 001514 | | | 90.13 |
| 001515 | | | 96.51 |
| 001516 | | | 86.92 |
| 001517 | | | 94.99 |
| 001518 | | | 55.55 |
| 001519 | | | 64.78 |
| 001520 | | | 89.81 |
| 001521 | | | 98.46 |
| 001522 | | | 43.77 |
| 001523 | | | 86.12 |
| 001524 | | | 88.36 |
| 001525 | | | 96.84 |
| 001526 | | | 95.91 |
| 001527 | | | 97.03 |
| 001528 | | | 98.57 |
| 001529 | | | 42.58 |
| 001530 | | | 82.22 |
| 001531 | | | 98.96 |
| 001532 | | | 97.36 |
| 001533 | | | 94.01 |
| 001534 | | | 98.77 |
| 001535 | | | 98.66 |
| 001536 | | | 36.22 |
| 001537 | | | 98.10 |
| 001538 | | | 14.11 |
| 001539 | | | 89.73 |
| 001540 | | | 94.65 |
| 001541 | | | 97.37 |
| 001542 | | | 46.47 |
| 001543 | | | 83.28 |
| 001544 | | | 98.35 |
| 001545 | | | 97.35 |
| 001546 | | | 93.48 |
| 001547 | | | 94.75 |
| 001548 | | | 98.94 |
| 001549 | | | 96.93 |
| 001550 | | | 40.06 |
| 001551 | | | 92.73 |
| 001552 | | | 81.48 |
| 001553 | | | 51.25 |
| 001554 | | | 95.76 |
| 001555 | | | 58.84 |
| 001556 | | | 97.54 |
| 001557 | | | 94.59 |
| 001558 | | | 95.20 |
| 001559 | | | 96.90 |
| 001560 | | | 95.72 |
| 001561 | | | 98.11 |
| 001562 | | | 99.43 |
| 001563 | | | 96.50 |
| 001564 | | | 95.13 |
| 001565 | | | 97.29 |
| 001566 | | | 7.34 |
| 001567 | | | 48.99 |
| 001568 | | | 9.48 |
| 001569 | | | 88.70 |
| 001570 | | | 45.55 |
| 001571 | | | 28.53 |
| 001572 | | | 24.38 |
| 001573 | | | 40.00 |
| 001574 | | | 53.37 |
| 001575 | | | 82.87 |
| 001576 | | | 0.00 |
| 001577 | | | 4.24 |
| 001578 | | | 88.26 |
| 001579 | | | 89.67 |
| 001580 | | | 4.30 |
| 001581 | | | 68.48 |
| 001582 | | | 97.42 |
| 001583 | | | 89.36 |
| 001584 | | | 88.14 |
| 001585 | | | 96.53 |
| 001586 | | | 1.70 |
| 001587 | | | 83.16 |
| 001588 | | | 97.69 |
| 001589 | | | 96.73 |
| 001590 | | | 25.31 |
| 001591 | | | 89.49 |
| 001592 | | | 92.15 |
| 001593 | | | 98.01 |
| 001594 | | | 94.49 |
| 001595 | | | 95.32 |
| 001596 | | | 97.53 |
| 001597 | | | 96.76 |
| 001598 | | | 99.01 |
| 001599 | | | 31.61 |
| 001600 | | | 43.20 |
| 001601 | | | 97.02 |
| 001602 | | | 97.29 |
| 001603 | | | 85.39 |
| 001604 | | | 96.88 |
| 001605 | | 80.20 | 98.32 |
| 001606 | | 81.32 | 96.49 |
| 001607 | | | 93.58 |
| 001608 | | | 87.86 |
| 001609 | | | 97.39 |
| 001610 | | | 97.75 |
| 001611 | | | 95.64 |
| 001612 | | | 85.04 |
| 001613 | | | 93.59 |
| 001614 | | | 97.47 |
| 001615 | | | 94.15 |
| 001616 | | | 95.26 |
| 001617 | | | 96.66 |
| 001618 | | | 99.14 |
| 001619 | | | 92.11 |
| 001620 | | | 98.32 |
| 001621 | | | 98.28 |
| 001622 | | | 65.91 |
| 001623 | | | 97.22 |
| 001624 | | | 37.36 |
| 001625 | | | 98.98 |
| 001626 | | | 19.81 |
| 001627 | | | 1.50 |
| 001628 | | | 96.82 |
| 001629 | | | 95.28 |
| 001630 | | | 75.33 |
| 001631 | | | 98.61 |
| 001632 | | | 92.03 |
| 001633 | | | 96.54 |
| 001634 | | | 96.04 |
| 001635 | | | 97.03 |
| 001636 | | | 95.33 |
| 001637 | | 69.47 | 98.13 |
| 001638 | | | 90.61 |
| 001639 | | | 96.14 |
| 001640 | | | 95.08 |
| 001641 | | | 94.21 |
| 001642 | | | 99.28 |
| 001643 | | | 98.97 |
| 001644 | | | 97.73 |
| 001645 | | | 98.20 |
| 001646 | | | 73.02 |
| 001647 | | | 83.71 |
| 001648 | | | 98.00 |
| 001650 | | | 97.92 |
| 001651 | | | 87.49 |
| 001652 | | | 95.29 |
| 001653 | | | 98.48 |
| 001654 | | | 68.87 |
| 001655 | | | 59.51 |
| 001656 | | | 34.27 |
| 001657 | | | 53.42 |
| 001658 | | | 38.63 |
| 001659 | | | 98.43 |
| 001660 | | | 96.93 |
| 001661 | | | 98.57 |
| 001664 | | | 21.64 |
| 001665 | | 68.25 | 97.09 |
| 001666 | | | 21.20 |
| 001667 | | | 76.17 |
| 001668 | | | 23.46 |
| 001669 | | | 95.13 |
| 001670 | | | 88.70 |
| 001671 | | | 96.79 |
| 001672 | | | 86.43 |
| 001673 | | | 93.03 |
| 001674 | | | 93.49 |
| 001675 | | | 53.18 |
| 001676 | | | 96.53 |
| 001677 | | | 89.85 |
| 001678 | | | 96.92 |
| 001679 | | | 99.01 |
| 001680 | | | 92.80 |
| 001681 | | | 46.47 |
| 001682 | | | 23.90 |
| 001683 | | | 96.76 |
| 001684 | | | 98.07 |
| 001685 | | | 88.51 |
| 001686 | | | 46.72 |
| 001687 | | | 55.48 |
| 001688 | | | 87.56 |
| 001689 | | | 96.55 |
| 001690 | | | 91.63 |
| 001691 | | | 72.70 |
| 001692 | | | 88.15 |
| 001693 | | | 75.79 |
| 001694 | | | 97.17 |
| 001695 | | | 84.27 |
| 001696 | | | 73.76 |
| 001697 | | | 81.28 |
| 001698 | | | 92.78 |
| 001699 | | | 87.80 |
| 001700 | | | 96.54 |
| 001701 | | | 81.50 |
| 001702 | | | 96.42 |
| 001703 | | | 99.36 |
| 001704 | | | 62.57 |
| 001705 | | | 76.93 |
| 001706 | | | 96.55 |
| 001707 | | | 97.41 |
| 001708 | | | 98.62 |
| 001709 | | | 93.57 |
| 001710 | | | 91.05 |
| 001711 | | | 78.79 |
| 001712 | | | 98.12 |
| 001713 | | | 82.95 |
| 001714 | | | 96.29 |
| 001715 | | | 84.66 |
| 001716 | | | 93.49 |
| 001717 | | | 77.89 |
| 001718 | | | 95.26 |
| 001719 | | | 78.69 |
| 001720 | | | 97.97 |
| 001721 | | | 98.37 |
| 001722 | | | 75.87 |
| 001723 | | | 96.81 |
| 001724 | | | 92.03 |
| 001725 | | | 95.15 |
| 001726 | | | 48.65 |
| 001727 | | | 61.40 |
| 001728 | | | 68.82 |
| 001729 | | | 99.24 |
| 001730 | | | 97.45 |
| 001731 | | | 98.82 |
| 001732 | | | 78.91 |
| 001733 | | | 98.43 |
| 001734 | | | 97.45 |
| 001735 | | | 98.69 |
| 001736 | | | 95.63 |
| 001737 | | | 37.00 |
| 001738 | | | 83.19 |
| 001739 | | | 84.08 |
| 001740 | | | 63.16 |
| 001741 | | | 77.16 |
| 001742 | | | 83.19 |
| 001743 | | | 96.66 |
| 001744 | | | 99.00 |
| 001745 | | | 96.87 |
| 001746 | | | 99.50 |
| 001747 | | | 74.14 |
| 001748 | | | 86.48 |
| 001749 | | | 98.64 |
| 001750 | | | 90.50 |
| 001751 | | | 98.73 |
| 001752 | | | 97.99 |
| 001753 | | | 91.35 |
| 001754 | | | 95.51 |
| 001755 | | | 96.16 |
| 001756 | | | 98.19 |
| 001757 | | | 98.24 |
| 001758 | | | 98.79 |
| 001759 | | | 98.91 |
| 001760 | | | 99.17 |
| 001761 | | | 25.21 |
| 001762 | | | 99.25 |
| 001763 | | | 98.79 |
| 001764 | | | 94.82 |
| 001765 | | | 97.59 |
| 001766 | | | 95.90 |
| 001767 | | | 97.68 |
| 001768 | | | 91.15 |
| 001769 | | | 97.84 |
| 001770 | | | 98.67 |
| 001771 | | | 98.38 |
| 001772 | | | 71.36 |
| 001773 | | | 94.64 |
| 001774 | | | 98.19 |
| 001775 | | | 98.22 |
| 001776 | | | 97.56 |
| 001777 | | | 98.32 |
| 002497 | | | 96.00 |
| 002498 | | | 73.09 |
| 002501 | | | 40.30 |
| 002502 | | | 97.11 |
| 002505 | | | 97.00 |
| 002506 | | | 89.76 |
| 002509 | | | 36.73 |
| 002510 | | | 96.60 |
| 002512 | | | 89.51 |
| 002513 | | | 97.00 |
| 002515 | | | 93.89 |
| 002516 | | | 94.05 |
| 002518 | | | 84.02 |
| 002519 | | | 93.27 |
| 002521 | | | 80.85 |
| 002522 | | | 95.25 |
| 002682 | | 95.33 | |
| 002683 | | 1.20 | |
| 002684 | | −9.54 | |
| 002685 | | −14.92 | |
| 002686 | 23.43 | 66.50 | |
| 002687 | | 22.28 | |
| 002688 | | 22.98 | |
| 002689 | | 21.33 | |
| 002690 | 17.77 | 80.59 | |
| 002691 | | 10.92 | |
| 002692 | 46.47 | 50.45 | |
| 002693 | 25.37 | 73.62 | |
| 002694 | 13.73 | 89.68 | |
| 002695 | | 4.33 | |
| 002696 | | 54.50 | |
| 002697 | | 18.82 | |
| 002698 | | 78.14 | |
| 002699 | | 54.43 | |
| 002700 | | 37.56 | |
| 002701 | | 29.12 | |
| 002702 | | 61.10 | |
| 002703 | | 19.91 | |
| 002704 | | 15.92 | |
| 002705 | 43.93 | 26.99 | |
| 002706 | | 63.55 | |
| 002707 | | 1.11 | |
| 002708 | | −2.77 | |
| 002709 | | 2.59 | |
| 002710 | | 62.26 | |
| 002711 | | 15.08 | |
| 002712 | | 26.32 | |
| 002713 | | 46.80 | |
| 002714 | | 62.81 | |
| 002715 | | 37.41 | |
| 002716 | | 7.02 | |
| 002717 | | 3.29 | |
| 002718 | | 71.97 | |
| 002719 | | 30.10 | |
| 002720 | | 54.17 | |
| 002721 | | 68.28 | |
| 002722 | | 38.34 | |
| 002723 | | 92.32 | |
| 002724 | | 54.18 | |
| 002725 | | 41.66 | |
| 002726 | | −7.44 | |
| 002727 | | 48.69 | |
| 002728 | | 50.35 | |
| 002729 | | 62.82 | |
| 002730 | 19.98 | 71.02 | |
| 002731 | | −9.08 | |
| 002732 | | 22.18 | |
| 002733 | | −26.37 | |
| 002734 | | 32.00 | |
| 002735 | | 37.47 | |
| 002736 | | 51.16 | |
| 002737 | | 82.19 | |
| 002738 | 28.50 | 95.49 | |
| 002739 | 31.73 | 93.88 | |
| 002740 | | −11.63 | |
| 002741 | | 75.63 | |
| 002742 | | 24.64 | |
| 002743 | | 59.33 | |
| 002744 | | −26.74 | |
| 002745 | | −43.83 | |
| 002746 | | 57.42 | |
| 002747 | | 28.09 | |
| 002748 | | 72.43 | |
| 002749 | | 53.95 | |
| 002750 | | 43.67 | |
| 002751 | | 74.80 | |
| 002752 | | 64.91 | |
| 002753 | | 50.58 | |
| 002754 | | −25.68 | |
| 002756 | | 11.92 | |
| 002757 | | 43.09 | |
| 002758 | | 63.86 | |
| 002759 | | −25.37 | |
| 002760 | | 47.32 | |
| 002761 | 37.76 | 78.45 | |
| 002762 | 15.98 | 92.30 | |
| 002763 | 25.18 | 60.22 | |
| 002764 | | 2.36 | |
| 002765 | 24.45 | 52.94 | |
| 002766 | | 15.20 | |
| 002767 | | −29.58 | |
| 002768 | | 48.77 | |
| 002769 | | 45.69 | |
| 002770 | | 38.67 | |
| 002771 | | 37.54 | |
| 002772 | | 54.79 | |
| 002773 | | 42.63 | |
| 002774 | | 13.83 | |
| 002775 | | −11.57 | |
| 002776 | | 0.87 | |
| 002777 | | −14.96 | |
| 002778 | | 41.12 | |
| 002779 | 2.88 | 96.07 | |
| 002781 | | −7.21 | |
| 002782 | | 18.54 | |
| 002783 | | −17.40 | |
| 002784 | | 33.49 | |
| 002785 | 18.22 | 82.74 | |
| 002786 | | 64.97 | |
| 002787 | | 48.31 | |
| 002788 | | 70.21 | |
| 002789 | | 22.04 | |
| 002790 | | −35.98 | |
| 002791 | | 82.42 | |
| 002792 | | 5.33 | |
| 002793 | | −72.87 | |
| 002794 | | 13.30 | |
| 002795 | | 17.01 | |
| 002796 | | −15.62 | |
| 002797 | | −11.81 | |
| 002798 | 20.46 | 92.79 | |
| 002799 | | 36.69 | |
| 002800 | | 8.18 | |
| 002801 | 24.63 | 78.64 | |
| 002802 | | 24.94 | |
| 002803 | | 59.45 | |
| 002804 | 14.68 | 72.02 | |
| 002805 | 5.48 | 101.11 | |
| 002806 | | −51.77 | |
| 002807 | | 29.71 | |
| 002808 | | 13.64 | |
| 002809 | | 14.03 | |
| 002810 | | 7.26 | |
| 002811 | | 0.47 | |
| 002812 | | 23.34 | |
| 002813 | | 28.04 | |
| 002814 | | 38.49 | |
| 002815 | | 48.52 | |
| 002817 | 6.88 | 79.56 | |
| 002818 | | 46.21 | |
| 002819 | | 19.80 | |
| 002820 | 30.99 | 59.98 | |
| 002821 | | 14.53 | |
| 002822 | | 10.38 | |
| 002823 | | 28.46 | |
| 002824 | | 64.36 | |
| 002825 | | 57.18 | |
| 002826 | | 61.70 | |
| 002827 | | 80.80 | |
| 002828 | 24.17 | 94.67 | |
| 002829 | | 74.62 | |
| 002830 | | 56.37 | |
| 002831 | | 68.47 | |
| 002832 | | 70.03 | |
| 002833 | 23.72 | 97.46 | |
| 002834 | | 77.62 | |
| 002835 | | 85.90 | |
| 002836 | 23.08 | 97.91 | |
| 002837 | 19.28 | 94.65 | |
| 002838 | 18.33 | 104.88 | |
| 002839 | | 85.79 | |
| 002840 | | 85.59 | |
| 002841 | | 92.58 | |
| 002842 | 18.82 | 95.83 | |
| 002843 | | 101.31 | |
| 002844 | | 92.28 | |
| 002845 | | 97.70 | |
| 002846 | | 92.26 | |
| 002847 | 16.72 | 94.46 | |
| 002848 | 25.33 | 87.32 | |
| 002849 | 20.05 | 94.91 | |
| 002850 | 16.14 | 99.26 | |
| 002851 | | 90.11 | |
| 002852 | 9.88 | 96.79 | |
| 002853 | | 86.42 | |
| 002854 | | 97.04 | |
| 002855 | | 82.28 | |
| 002856 | | 89.01 | |
| 002857 | | 98.68 | |
| 002858 | 12.25 | 89.87 | |
| 002859 | 10.30 | 94.96 | |
| 002860 | 21.65 | 83.01 | |
| 002861 | | 52.61 | |
| 002862 | | 71.58 | |
| 002863 | 22.64 | 76.10 | |
| 002864 | 32.06 | 72.52 | |
| 002865 | | 77.41 | |
| 002866 | | 90.16 | |
| 002867 | 25.45 | 68.04 | |
| 002868 | | 84.17 | |
| 002869 | | 96.43 | |
| 002870 | | 96.31 | |
| 002871 | | 84.28 | |
| 002872 | | 92.88 | |
| 002873 | | 57.41 | |
| 002874 | | 83.22 | |
| 002875 | | 76.54 | |
| 002876 | | 72.10 | |
| 002877 | | 68.45 | |
| 002878 | | 66.91 | |
| 002879 | | 49.09 | |
| 002880 | | 49.72 | |
| 002881 | | 81.79 | |
| 002882 | | 51.80 | |
| 002883 | | 74.95 | |
| 002884 | | 69.44 | |
| 002885 | | 53.71 | |
| 002886 | | 60.10 | |
| 002887 | | 87.87 | |
| 002888 | | 57.43 | |
| 002889 | | 69.96 | |
| 002890 | | 60.39 | |
| 002891 | | 46.41 | |
| 002892 | | 72.22 | |
| 002893 | | 79.33 | |
| 002894 | | 76.86 | |
| 002895 | | 78.35 | |
| 002896 | | 84.26 | |
| 002897 | | 90.55 | |
| 002898 | | 89.03 | |
| 002899 | | 86.63 | |
| 002900 | | 90.84 | |
| 002901 | 17.19 | 93.64 | |
| 002902 | | 72.42 | |
| 002903 | | 63.04 | |
| 002904 | 37.80 | 72.98 | |
| 002905 | | 57.74 | |
| 002906 | 22.25 | 88.63 | |
| 002907 | | 65.67 | |
| 002908 | 23.07 | 62.36 | |
| 002909 | 25.58 | 73.56 | |
| 002910 | | 65.86 | |
| 002911 | 35.41 | 58.77 | |
| 002912 | | 73.36 | |
| 002913 | | 31.74 | |
| 002914 | | 59.69 | |
| 002915 | | 27.75 | |
| 002916 | | 45.10 | |
| 002917 | | 60.59 | |
| 002918 | | 13.88 | |
| 002919 | | 28.74 | |
| 002920 | | 0.85 | |
| 002921 | | 51.73 | |
| 002922 | | 61.98 | |
| 002923 | | 41.41 | |
| 002924 | | 65.74 | |
| 002925 | | 56.59 | |
| 002926 | | 46.85 | |
| 002927 | | 4.82 | |
| 002928 | | 54.34 | |
| 002929 | | 71.20 | |
| 002930 | | 58.30 | |
| 002931 | | 71.04 | |
| 002932 | | 69.92 | |
| 002933 | | 74.66 | |
| 002934 | | 41.68 | |
| 002935 | 35.29 | 63.18 | |
| 002936 | | 62.82 | |
| 002937 | | 51.06 | |
| 002938 | 41.44 | 79.88 | |
| 002939 | | 41.98 | |
| 002940 | | 27.73 | |
| 002941 | | 35.61 | |
| 002942 | | 44.94 | |
| 002943 | | 18.85 | |
| 002944 | | 48.41 | |
| 002945 | | 23.64 | |
| 002946 | | −4.83 | |
| 002947 | | 54.67 | |
| 002948 | | 41.03 | |
| 002949 | | 4.17 | |
| 002950 | | 22.52 | |
| 002951 | | 72.99 | |
| 002952 | | 65.01 | |
| 002953 | | 49.43 | |
| 002954 | | 14.23 | |
| 002955 | | 82.17 | |
| 002956 | | 78.37 | |
| 002957 | | 41.97 | |
| 002958 | | 47.59 | |
| 002959 | | 53.29 | |
| 002960 | | 63.16 | |
| 002961 | | 40.33 | |
| 002962 | | 76.96 | |
| 002963 | | 70.92 | |
| 002964 | | 58.89 | |
| 002965 | | 82.07 | |
| 002966 | | 81.55 | |
| 002967 | | 94.11 | |
| 002968 | 27.54 | 81.58 | |
| 002969 | | 86.51 | |
| 002970 | | 52.77 | |
| 002971 | | 55.04 | |
| 002972 | | 77.75 | |
| 002973 | | 51.75 | |
| 002974 | | 44.56 | |
| 002975 | | 25.94 | |
| 002976 | | 58.69 | |
| 002977 | | 55.99 | |
| 002978 | | 38.04 | |
| 002979 | | 74.10 | |
| 002980 | | 77.28 | |
| 002981 | | 61.74 | |
| 002982 | 36.47 | 88.88 | |
| 002983 | 35.04 | 56.83 | |
| 002984 | | 54.64 | |
| 002985 | | 27.53 | |
| 002986 | | 6.97 | |
| 002987 | | 69.57 | |
| 002988 | | 68.81 | |
| 002989 | 25.80 | 71.60 | |
| 002990 | 29.45 | 68.74 | |
| 002991 | 28.01 | 65.69 | |
| 002992 | 36.12 | 48.78 | |
| 002993 | 27.05 | 39.64 | |
| 002994 | 24.77 | 64.32 | |
| 002995 | 48.48 | 38.31 | |
| 002996 | | 30.55 | |
| 002997 | | 33.31 | |
| 002998 | | 32.09 | |
| 002999 | | 51.54 | |
| 003000 | | 35.18 | |
| 003001 | | 22.05 | |
| 003002 | | 55.54 | |
| 003003 | | 52.49 | |
| 003004 | | 28.96 | |
| 003005 | | 32.53 | |
| 003006 | | 52.82 | |
| 003007 | | 34.61 | |
| 003008 | | 55.33 | |
| 003009 | | 55.30 | |
| 003010 | | 23.41 | |
| 003011 | | 28.72 | |
| 003012 | | 26.69 | |
| 003013 | | 50.85 | |
| 003014 | | 25.80 | |
| 003015 | | 58.24 | |
| 003016 | | 57.76 | |
| 003017 | | 60.10 | |
| 003018 | | 55.98 | |
| 003019 | | 37.95 | |
| 003020 | | 51.08 | |
| 003021 | | 49.22 | |
| 003022 | | 27.15 | |
| 003023 | | 45.72 | |
| 003024 | | 21.63 | |
| 003025 | | 10.98 | |
| 003026 | | 58.38 | |
| 003027 | | 60.66 | |
| 003028 | | 85.31 | |
| 003029 | | 90.85 | |
| 003030 | | 83.55 | |
| 003031 | | 80.99 | |
| 003032 | | 58.38 | |
| 003033 | | 88.79 | |
| 003034 | | 88.43 | |
| 003035 | | 60.36 | |
| 003036 | | 66.47 | |
| 003037 | | 75.80 | |
| 003038 | | 62.86 | |
| 003039 | | 53.38 | |
| 003040 | | 68.27 | |
| 003041 | | 82.91 | |
| 003042 | | 77.35 | |
| 003043 | | 88.89 | |
| 003044 | | 82.69 | |
| 003045 | | 91.31 | |
| 003046 | | 90.21 | |
| 003047 | | 77.62 | |
| 003048 | | 91.95 | |
| 003049 | | 70.94 | |
| 003050 | | 68.28 | |
| 003051 | | 23.34 | |
| 003052 | | 89.15 | |
| 003053 | | 79.91 | |
| 003054 | | 75.11 | |
| 003055 | | 40.65 | |
| 003056 | | 64.49 | |
| 003057 | | 46.73 | |
| 003058 | 18.38 | 79.72 | |
| 003059 | | 64.89 | |
| 003060 | | 82.81 | |
| 003061 | 35.17 | 77.51 | |
| 003062 | | 91.09 | |
| 003063 | 24.07 | 83.73 | |
| 003064 | | 76.58 | |
| 003065 | | 33.05 | |
| 003066 | | 46.13 | |
| 003067 | | 55.28 | |
| 003068 | | 60.22 | |
| 003069 | 23.24 | 90.99 | |
| 003070 | | 100.65 | |
| 003071 | | 100.06 | |
| 003072 | | 83.67 | |
| 003073 | | 52.68 | |
| 003074 | | 40.20 | |
| 003075 | | 46.91 | |
| 003076 | | 94.63 | |
| 003077 | | 36.22 | |
| 003078 | | 73.25 | |
| 003079 | | 30.02 | |
| 003080 | 26.56 | 63.86 | |
| 003081 | | 41.53 | |
| 003082 | | 28.13 | |
| 003083 | | 29.28 | |
| 003084 | | 62.36 | |
| 003085 | | 56.40 | |
| 003086 | | 40.35 | |
| 003087 | | 46.51 | |
| 003088 | | 81.62 | |
| 003089 | | 40.70 | |
| 003090 | | 16.74 | |
| 003091 | | −31.97 | |
| 003092 | 27.33 | 75.64 | |
| 003093 | | 57.04 | |
| 003094 | | 47.08 | |
| 003095 | | 50.25 | |
| 003096 | | 97.99 | |
| 003097 | | 21.77 | |
| 003098 | | 28.49 | |
| 003099 | | 28.12 | |
| 003100 | | 42.21 | |
| 003101 | | 21.21 | |
| 003102 | | 64.79 | |
| 003103 | | 38.31 | |
| 003104 | | 47.01 | |
| 003105 | | 49.06 | |
| 003106 | | 34.90 | |
| 003107 | | 75.42 | |
| 003108 | | 43.21 | |
| 003109 | | 49.01 | |
| 003110 | | 36.26 | |
| 003111 | | 23.63 | |
| 003112 | | 66.14 | |
| 003113 | | 34.90 | |
| 003114 | | 58.51 | |
| 003115 | | 38.73 | |
| 003116 | | 51.08 | |
| 003117 | | 55.85 | |
| 003118 | | 51.05 | |
| 003119 | | 76.32 | |
| 003120 | | 38.75 | |
| 003121 | | 41.33 | |
| 003122 | | 26.75 | |
| 003123 | | 89.71 | |
| 003124 | | 94.73 | |
| 003125 | | 36.37 | |
| 003126 | | 45.19 | |
| 003127 | | 48.72 | |
| 003128 | | 96.16 | |
| 003129 | | 75.36 | |
| 003130 | | 79.23 | |
| 003131 | | 32.12 | |
| 003132 | | 86.82 | |
| 003133 | | 91.23 | |
| 003134 | | 91.15 | |
| 003135 | | 61.01 | |
| 003136 | | 92.96 | |
| 003137 | | 98.16 | |
| 003138 | | 96.08 | |
| 003139 | | 85.71 | |
| 003140 | | 93.92 | |
| 003141 | | 83.10 | |
| 003142 | | 49.19 | |
| 003143 | | 68.12 | |
| 003144 | | 72.13 | |
| 003145 | | 88.75 | |
| 003146 | | 52.03 | |
| 003147 | | 85.96 | |
| 003148 | | 81.98 | |
| 003149 | | 60.54 | |
| 003150 | | 76.59 | |
| 003151 | | 88.52 | |
| 003152 | | 61.33 | |
| 003153 | | 65.84 | |
| 003154 | | −22.95 | |
| 003155 | | 55.13 | |
| 003156 | | 55.05 | |
| 003157 | | 57.84 | |
| 003158 | | 67.08 | |
| 003159 | | 90.69 | |
| 003160 | | 72.52 | |
| 003161 | | 74.97 | |
| 003162 | | 60.08 | |
| 003163 | | 59.49 | |
| 003164 | | 59.78 | |
| 003165 | | 81.07 | |
| 003166 | | 73.40 | |
| 003167 | | 70.43 | |
| 003168 | | 66.28 | |
| 003169 | | 83.03 | |
| 003170 | | 53.53 | |
| 003171 | | 52.55 | |
| 003172 | 35.33 | 85.95 | |
| 003173 | 20.25 | 83.03 | |
| 003174 | | 62.18 | |
| 003175 | | 79.00 | |
| 003176 | 30.83 | 77.82 | |
| 003177 | | 61.99 | |
| 003178 | | 45.26 | |
| 003179 | 25.35 | 73.05 | |
| 003180 | | 79.38 | |
| 003181 | | 70.10 | |
| 003182 | | 74.37 | |
| 003183 | | 73.15 | |
| 003184 | | 59.43 | |
| 003185 | | 44.93 | |
| 003186 | | 53.61 | |
| 003187 | | 46.54 | |
| 003188 | | 47.63 | |
| 003189 | | 48.17 | |
| 003190 | | 30.31 | |
| 003191 | | 47.32 | |
| 003192 | | 40.98 | |
| 003193 | | 49.25 | |
| 003194 | | 42.57 | |
| 003195 | | 36.82 | |
| 003196 | | −25.70 | |
| 003197 | | 35.92 | |
| 003198 | 33.09 | 44.05 | |
| 003199 | 32.12 | 69.44 | |
| 003200 | | 23.75 | |
| 003201 | | 47.15 | |
| 003202 | | 59.65 | |
| 003203 | 35.85 | 67.82 | |
| 003204 | | 42.96 | |
| 003205 | | −17.25 | |
| 003206 | | 71.37 | |
| 003207 | | 20.74 | |
| 003208 | | 66.08 | |
| 003209 | | 44.05 | |
| 003210 | | 58.38 | |
| 003211 | | 17.14 | |
| 003212 | | 56.51 | |
| 003213 | | 27.62 | |
| 003214 | | 27.76 | |
| 003215 | | 42.83 | |
| 003216 | | 37.45 | |
| 003217 | | 1.28 | |
| 003218 | | 57.76 | |
| 003219 | | 8.08 | |
| 003220 | | 38.66 | |
| 003221 | | 53.42 | |
| 003222 | | 21.62 | |
| 003223 | | −17.26 | |
| 003224 | | 19.25 | |
| 003225 | | 58.69 | |
| 003226 | 45.22 | 67.60 | |
| 003227 | | 32.63 | |
| 003228 | | 66.33 | |
| 003229 | 32.72 | 91.79 | |
| 003230 | | 84.54 | |
| 003231 | 18.30 | 110.67 | |
| 003232 | | 38.03 | |
| 003233 | | 59.42 | |
| 003234 | | 55.28 | |
| 003235 | | 69.81 | |
| 003236 | | −8.88 | |
| 003237 | | 35.74 | |
| 003238 | | 40.93 | |
| 003239 | | 65.69 | |
| 003240 | | 61.50 | |
| 003241 | | 26.85 | |
| 003242 | | 8.46 | |
| 003274 | | 75.48 | |
| 003275 | | 81.53 | |
| 003276 | | 86.28 | |
| 003277 | | 89.60 | |
| 003278 | | 98.90 | |
| 003279 | 31.60 | 86.29 | |
| 003280 | | 30.88 | |
| 003281 | | 64.42 | |
| 003282 | | 63.62 | |
| 003283 | | 22.11 | |
| 003284 | | 30.73 | |
| 003285 | | 76.98 | |
| 003286 | | 63.56 | |
| 003287 | | 74.35 | |
| 003288 | | 78.57 | |
| 003289 | | 78.13 | |
| 003290 | | 93.20 | |
| 003291 | | 83.96 | |
| 003292 | | 70.56 | |
| 003293 | | 72.75 | |
| 003294 | | 77.67 | |
| 003295 | | 13.96 | |
| 003296 | | 38.53 | |
| 003297 | | 71.74 | |
| 003298 | | 58.27 | |
| 003299 | | 55.71 | |
| 003300 | | 71.55 | |
| 003301 | | 43.11 | |
| 003302 | | 51.44 | |
| 003303 | | 29.31 | |
| 003304 | | 82.51 | |
| 003305 | | 90.20 | |
| 003306 | | 80.15 | |
| 003307 | | 84.71 | |
| 003308 | | 76.87 | |
| 003309 | | 22.92 | |
| 003310 | | 19.40 | |
| 003311 | | 70.95 | |
| 003312 | | 71.27 | |
| 003313 | | 72.19 | |
| 003314 | | 66.48 | |
| 003315 | | 71.96 | |
| 003316 | | 42.88 | |
| 003317 | | 75.76 | |
| 003318 | | 40.39 | |
| 003319 | | 23.04 | |
| 003320 | | 63.14 | |
| 003321 | | 37.14 | |
| 003322 | | 25.13 | |
| 003323 | | 87.00 | |
| 003324 | | 58.90 | |
| 003325 | | 55.25 | |
| 003326 | | 3.60 | |
| 003327 | | 33.45 | |
| 003328 | | 56.37 | |
| 003329 | | 60.49 | |
| 003330 | | 81.29 | |
| 003331 | | 76.22 | |
| 003332 | | 74.15 | |
| 003333 | | 44.44 | |
| 003334 | | −19.13 | |
| 003335 | | 42.85 | |
| 003336 | | 69.34 | |
| 003337 | | 74.87 | |
| 003338 | | 77.48 | |
| 003339 | | 73.78 | |
| 003340 | | 52.89 | |
| 003341 | | 41.75 | |
| 003342 | | 77.95 | |
| 003343 | | 50.80 | |
| 003344 | | 57.59 | |
| 003345 | 26.98 | 74.35 | |
| 003346 | | −21.50 | |
| 003347 | | 63.11 | |
| 003348 | | 61.47 | |
| 003349 | | 86.85 | |
| 003350 | | 14.40 | |
| 003351 | | 61.89 | |
| 003352 | | 70.61 | |
| 003353 | | 73.88 | |
| 003354 | | 55.78 | |
| 003355 | | 24.37 | |
| 003356 | | 65.30 | |
| 003357 | | 69.87 | |
| 004842 | 66.43 | 60.01 | |
| 004843 | 78.67 | 6.69 | |
| 004844 | 106.29 | 32.11 | |
| 004845 | 89.51 | 1.14 | |
| 004846 | 106.28 | 14.57 | |
| 004847 | 38.71 | 43.24 | |
| 004848 | 55.61 | 32.35 | |
| 004849 | 75.08 | 16.35 | |
| 004850 | 76.30 | 58.79 | |
| 004851 | 83.17 | 34.11 | |
| 004852 | 42.61 | 51.86 | |
| 004853 | 60.12 | 47.34 | |
| 004854 | 90.33 | 0.16 | |
| 004855 | 94.95 | 16.20 | |
| 004856 | 31.66 | 57.54 | |
| 004857 | 31.76 | 73.09 | |
| 004858 | 68.75 | 41.66 | |
| 004859 | 73.63 | 49.78 | |
| 004860 | 66.87 | 36.74 | |
| 004861 | 16.75 | 93.47 | |
| 004862 | 28.88 | 75.56 | |
| 004863 | 55.59 | 31.89 | |
| 004864 | 41.42 | 56.48 | |
| 004865 | 48.89 | 41.88 | |
| 004866 | 22.93 | 86.43 | |
| 004867 | 23.55 | 83.72 | |
| 004868 | 37.28 | 42.41 | |
| 004869 | 56.13 | 73.75 | |
| 004870 | 65.76 | 62.33 | |
| 004871 | 22.71 | 97.66 | |
| 004872 | 36.75 | 43.17 | |
| 004873 | 58.22 | 30.67 | |
| 004874 | 51.16 | 60.26 | |
| 004875 | 72.81 | 40.30 | |
| 004876 | 33.85 | 71.57 | |
| 004877 | 47.33 | 46.70 | |
| 004878 | 68.08 | 20.64 | |
| 004879 | 68.60 | 34.25 | |
| 004880 | 66.72 | 45.90 | |
| 004881 | 13.43 | 100.98 | |
| 004882 | 23.94 | 97.34 | |
| 004883 | 27.38 | 55.94 | |
| 004884 | 28.69 | 42.19 | |
| 004885 | 37.72 | 89.15 | |
| 004886 | 20.94 | 85.41 | |
| 004887 | 28.41 | 86.07 | |
| 004888 | 31.68 | 60.85 | |
| 004889 | 26.57 | 92.62 | |
| 004890 | 56.87 | 83.42 | |
| 004891 | 22.53 | 97.52 | |
| 004892 | 27.44 | 97.04 | |
| 004893 | 39.21 | 65.29 | |
| 004894 | 29.74 | 93.37 | |
| 004895 | 54.33 | 66.52 | |
| 004896 | 29.02 | 42.73 | |
| 004897 | 92.43 | 91.36 | |
| 004898 | 53.08 | 74.59 | |
| 004899 | 55.34 | 91.21 | |
| 004900 | 64.11 | 74.38 | |
| 004901 | 23.34 | 67.79 | |
| 004902 | 21.57 | 91.34 | |
| 004903 | 17.33 | 92.92 | |
| 004904 | 38.63 | 82.17 | |
| 004905 | 53.40 | 82.51 | |
| 004906 | 56.36 | 86.11 | |
| 004907 | 71.44 | 63.30 | |
| 004908 | 45.27 | 74.84 | |
| 004909 | 34.39 | 72.69 | |
| 004910 | 36.45 | 85.01 | |
| 004911 | 39.02 | 62.84 | |
| 004912 | 31.57 | 65.97 | |
| 004913 | 35.70 | 86.56 | |
| 004914 | 36.92 | 74.59 | |
| 004915 | 30.83 | 91.77 | |
| 004916 | 41.11 | 72.85 | |
| 004917 | 34.83 | 83.73 | |
| 004918 | 50.68 | 42.52 | |
| 004919 | 48.45 | 28.74 | |
| 004920 | 76.97 | −1.98 | |
| 004921 | 40.45 | 78.05 | |
| 004922 | 36.28 | 45.00 | |
| 004923 | 52.79 | 49.31 | |
| 004924 | 45.10 | 52.15 | |
| 004925 | 43.67 | 45.03 | |
| 004926 | 50.14 | 54.69 | |
| 004927 | 56.64 | 64.52 | |
| 004928 | 65.48 | 66.42 | |
| 004929 | 62.59 | 43.66 | |
| 004930 | 72.38 | 60.75 | |
| 004931 | 39.55 | 75.60 | |
| 004932 | 26.83 | 90.35 | |
| 004933 | 31.40 | 76.43 | |
| 004934 | 43.52 | 80.52 | |
| 004935 | 39.38 | 43.83 | |
| 004936 | 47.32 | 82.57 | |
| 005008 | | 29.20 | |
| 005009 | | 63.57 | |
| 005010 | | 60.83 | |
| 005011 | | 59.08 | |
| 005012 | | 47.35 | |
| 005013 | | 30.27 | |
| 005014 | | 65.35 | |
| 005015 | | 70.87 | |
| 005016 | | 60.67 | |
| 005017 | | 55.88 | |
| 005018 | | 24.75 | |
| 005019 | | 7.46 | |
| 005020 | | 23.06 | |
| 005021 | | 60.79 | |
| 005022 | | 70.44 | |
| 005023 | | 69.98 | |
| 005024 | | 68.10 | |
| 005025 | | 66.38 | |
| 005026 | | 31.66 | |
| 005027 | | 57.57 | |
| 005028 | | 65.54 | |
| 005029 | | 66.90 | |
| 005030 | | 68.43 | |
| 005031 | | 58.90 | |
| 005032 | | 41.55 | |
| 005033 | | 28.77 | |
| 005034 | | 73.61 | |
| 005035 | | 71.12 | |
| 005036 | | 73.98 | |
| 005037 | | 72.64 | |
| 005038 | | 79.28 | |
| 005039 | | 59.37 | |
| 005040 | | 29.99 | |
| 005041 | | 30.56 | |
| 005042 | | 65.98 | |
| 005043 | | 63.95 | |
| 005044 | | 64.87 | |
| 005045 | | 70.95 | |
| 005046 | | 69.64 | |
| 005047 | | 57.93 | |
| 005048 | | 44.19 | |
| 005049 | | 54.45 | |
| 005050 | | 80.99 | |
| 005051 | | 86.49 | |
| 005052 | | 88.12 | |
| 005053 | | 84.16 | |
| 005054 | | 83.94 | |
| 005055 | | 55.45 | |
| 005056 | | 37.48 | |
| 005057 | | 41.74 | |
| 005058 | | 77.41 | |
| 005059 | | 75.79 | |
| 005060 | | 73.97 | |
| 005061 | | 74.08 | |
| 005062 | | 26.45 | |
| 005063 | | 24.24 | |
| 005064 | | 20.10 | |
| 005065 | | 25.22 | |
| 005066 | | 59.16 | |
| 005067 | | 52.52 | |
| 005068 | | 84.87 | |
| 005069 | | 79.78 | |
| 005070 | | 54.26 | |
| 005071 | | 63.79 | |
| 005072 | | 42.21 | |
| 005073 | | 69.43 | |
| 005074 | | 57.10 | |
| 005075 | | 79.53 | |
| 005076 | | 70.39 | |
| 005077 | | 69.15 | |
| 005078 | | 48.26 | |
| 005163 | 47.38 | 77.83 | |
| 005164 | 45.78 | 48.54 | |
| 005165 | 48.64 | 52.03 | |
| 005166 | 36.99 | 67.67 | |
| 005167 | 64.21 | 52.50 | |
| 005168 | 94.18 | 11.02 | |
| 005169 | 47.39 | 76.00 | |
| 005170 | 62.02 | 52.88 | |
| 005171 | 42.23 | 81.86 | |
| 005172 | 63.80 | 54.69 | |
| 005173 | 60.15 | 73.83 | |
| 005174 | 66.79 | 45.84 | |
| 005175 | 67.35 | 21.60 | |
| 005176 | 61.49 | 20.26 | |
| 005177 | 58.17 | 33.03 | |
| 005178 | 59.94 | 31.08 | |
| 005179 | 55.09 | 34.81 | |
| 005180 | 34.06 | 40.31 | |
| 005181 | 39.61 | 31.91 | |
| 005182 | 45.49 | 67.69 | |
| 005183 | 33.60 | 70.61 | |
| 005184 | 36.09 | 60.64 | |
| 005185 | 36.13 | 53.42 | |
| 005186 | 34.30 | 42.37 | |
| 005187 | 37.78 | 30.28 | |
| 005188 | 36.77 | 26.58 | |
| 005189 | 51.51 | 24.87 | |
| 005190 | 33.26 | 59.30 | |
| 005191 | 34.56 | 25.68 | |
| 005192 | 48.09 | 14.48 | |
| 005193 | 39.51 | 29.52 | |
| 005194 | 34.64 | 39.93 | |
| 005195 | 29.47 | 23.19 | |
| 005196 | 27.53 | 46.58 | |
| 005197 | 48.02 | 21.35 | |
| 005198 | 31.40 | 53.62 | |
| 005199 | 34.70 | 32.21 | |
| 005200 | 38.66 | 47.06 | |
| 005201 | 35.74 | 53.03 | |
| 005202 | 39.83 | 25.31 | |
| 005203 | 61.60 | 3.69 | |
| 005204 | 36.95 | 39.92 | |
| 005205 | 54.06 | 26.87 | |
| 005206 | 36.52 | 47.82 | |
| 005207 | 30.21 | 61.54 | |
| 005208 | 27.68 | 37.86 | |
| 005209 | 37.91 | 32.22 | |
| 005210 | 41.54 | 59.06 | |
| 005211 | 36.16 | 40.08 | |
| 005212 | 46.29 | 46.75 | |
| 005213 | 42.59 | 14.86 | |
| 005214 | 43.10 | 35.43 | |
| 005215 | 50.21 | 10.22 | |
| 005216 | 40.03 | 32.74 | |
| 005217 | 40.25 | 30.60 | |
| 005218 | 38.34 | 32.13 | |
| 005219 | 51.90 | 34.55 | |
| 005220 | 44.35 | 57.77 | |
| 005221 | 41.32 | 59.38 | |
| 005222 | 39.96 | 30.87 | |
| 005223 | 50.33 | 16.11 | |
| 005224 | 34.89 | 34.61 | |
| 005225 | 41.18 | 9.75 | |
| 005226 | 33.90 | 37.60 | |
| 005227 | 44.80 | −5.95 | |
| 005228 | 35.86 | 24.66 | |
| 005229 | 45.12 | 6.62 | |
| 005230 | 59.74 | | |
| 005231 | 34.88 | 44.18 | |
| 005232 | 61.94 | 46.84 | |
| 005233 | 55.00 | 42.98 | |
| 005234 | 59.61 | 48.30 | |
| 005235 | 48.55 | 54.20 | |
| 005236 | 64.58 | 43.82 | |
| 005237 | 76.10 | 50.85 | |
| 005238 | 58.89 | 37.30 | |
| 005239 | 53.91 | 50.20 | |
| 005240 | 49.68 | 60.10 | |
| 005241 | 46.30 | 68.14 | |
| 005242 | 71.92 | 38.32 | |
| 005243 | 60.65 | 72.40 | |
| 005244 | 44.93 | 73.00 | |
| 005245 | 33.95 | 80.83 | |
| 005246 | 40.65 | 67.26 | |
| 005247 | 51.33 | 57.75 | |
| 005248 | 64.71 | 29.11 | |
| 005249 | 65.49 | 44.92 | |
| 005250 | 59.12 | 56.71 | |
| 005251 | 46.14 | 52.67 | |
| 005252 | 69.43 | 43.26 | |
| 005253 | 60.92 | 39.22 | |
| 005254 | 61.34 | 65.79 | |
| 005255 | 50.04 | 70.16 | |
| 005256 | 72.20 | 60.01 | |
| 005257 | 57.82 | 77.12 | |
| 005258 | 39.88 | 71.48 | |
| 005259 | 45.61 | 77.75 | |
| 005260 | 58.25 | 33.64 | |
| 005261 | 55.88 | 66.66 | |
| 005262 | 43.64 | 81.42 | |
| 005263 | 45.59 | 58.90 | |
| 005264 | 41.46 | 72.58 | |
| 005265 | 45.89 | 61.52 | |
| 005266 | 47.48 | 56.68 | |
| 005267 | 43.83 | 78.24 | |
| 005268 | 48.81 | 66.14 | |
| 005269 | 39.65 | 60.97 | |
| 005270 | 36.82 | 62.53 | |
| 005271 | 41.90 | 64.71 | |
| 005272 | 47.97 | 61.19 | |
| 005273 | 35.28 | 81.48 | |
| 005274 | 45.44 | 57.24 | |
| 005275 | 40.97 | 68.49 | |
| 005276 | 38.97 | 68.12 | |
| 005277 | 39.51 | 76.52 | |
| 005278 | 44.86 | 75.07 | |
| 005279 | 50.60 | 62.52 | |
| 005280 | 58.51 | 50.62 | |
| 005281 | 44.45 | 54.63 | |
| 005282 | 44.50 | 57.45 | |
| 005283 | 34.26 | 65.61 | |
| 005284 | 46.66 | 57.00 | |
| 005285 | 39.59 | 86.23 | |
| 005286 | 62.91 | 46.94 | |
| 005287 | 34.88 | 87.27 | |
| 005288 | 39.59 | 70.30 | |
| 005289 | 42.84 | 62.23 | |
| 005290 | 41.97 | 65.69 | |
| 005291 | 32.24 | 70.95 | |
| 005292 | 32.43 | 83.62 | |
| 005293 | 53.70 | 67.64 | |
| 005294 | 61.01 | 54.60 | |
| 005295 | 51.33 | 62.32 | |
| 005296 | 42.19 | 73.78 | |
| 005297 | 53.58 | 52.99 | |
| 005298 | 47.07 | 41.12 | |
| 005299 | 50.56 | 65.62 | |
| 005300 | 63.23 | 13.82 | |
| 005301 | 67.38 | 26.21 | |
| 005302 | 83.32 | 26.29 | |
| 005303 | 50.40 | 58.57 | |
| 005304 | 44.75 | 56.31 | |
| 005305 | 33.34 | 78.10 | |
| 005306 | 49.89 | 53.29 | |
| 005307 | 55.34 | 41.69 | |
| 005308 | 39.01 | 74.61 | |
| 005309 | 42.98 | 64.78 | |
| 005310 | 61.89 | 55.05 | |
| 005311 | 62.63 | 30.63 | |
| 005312 | 69.06 | 18.51 | |
| 005313 | 54.58 | 64.77 | |
| 005314 | 46.02 | 61.62 | |
| 005315 | 53.20 | 48.93 | |
| 005316 | 54.78 | 32.32 | |
| 005317 | 43.46 | 81.73 | |
| 005318 | 74.94 | 36.85 | |
| 005319 | 49.72 | 50.63 | |
| 005320 | 55.05 | 71.07 | |
| 005321 | 46.98 | 54.91 | |
| 005322 | 60.58 | 26.66 | |
| 005323 | 51.00 | 35.64 | |
| 005324 | 48.71 | 73.43 | |
| 005325 | 68.99 | 46.68 | |
| 005326 | 54.94 | 42.37 | |
| 005327 | 55.34 | 56.95 | |
| 005328 | 47.29 | 48.13 | |
| 005329 | 63.45 | 42.36 | |
| 005330 | 49.78 | 81.92 | |
| 005331 | 62.98 | 27.03 | |
| 005332 | 64.80 | 18.30 | |
| 005333 | 61.42 | 44.54 | |
| 005334 | 58.99 | 40.14 | |
| 005335 | 53.89 | 52.91 | |
| 005336 | 40.83 | 58.21 | |
| 005337 | 75.32 | 36.80 | |
| 005338 | 35.69 | 84.70 | |
| 005339 | 48.36 | 48.75 | |
| 005340 | 48.12 | 57.88 | |
| 005341 | 58.15 | 36.60 | |
| 005342 | 72.91 | 36.06 | |
| 005343 | 53.37 | 67.24 | |
| 005344 | 72.26 | 41.55 | |
| 005345 | 60.26 | 47.54 | |
| 005346 | 50.62 | 56.52 | |
| 005347 | 70.74 | 34.62 | |
| 005348 | 47.46 | 74.57 | |
| 005349 | 61.95 | 53.47 | |
| 005350 | 76.01 | 41.52 | |
| 005351 | 56.42 | 49.40 | |
| 005352 | 52.01 | 41.92 | |
| 005353 | 53.53 | 57.32 | |
| 005354 | 43.16 | 50.51 | |
| 005355 | 53.75 | 46.31 | |
| 005356 | 63.93 | 45.46 | |
| 005357 | 71.88 | 40.82 | |
| 005358 | 47.58 | 61.41 | |
| 005359 | 82.11 | 21.37 | |
| 005360 | 63.34 | 47.07 | |
| 005361 | 56.11 | 71.64 | |
| 005362 | 54.42 | 57.04 | |
| 005363 | 97.38 | −32.23 | |
| 005364 | 66.27 | 48.41 | |
| 005365 | 65.30 | 44.53 | |
| 005366 | 77.81 | 54.19 | |
| 006658 | | 58.89 | |
| 006659 | | 35.00 | |
| 006660 | | 32.33 | |
| 006661 | | 32.92 | |
| 006662 | | 32.63 | |
| 006663 | | 67.61 | |
| 006664 | | 84.01 | |
| 006665 | | 26.12 | |
| 006666 | | 32.02 | |
| 006667 | | 42.45 | |
| 006668 | | 56.06 | |
| 006669 | | 17.96 | |
| 006670 | | 37.48 | |
| 006671 | | 31.41 | |
| 006672 | | 32.67 | |
| 006673 | | 32.06 | |
| 006674 | | 29.16 | |
| 006675 | | 18.87 | |
| 006676 | | 13.88 | |
| 006677 | | 9.75 | |
| 006678 | | −4.00 | |
| 006679 | | −1.04 | |
| 006680 | | 27.72 | |
| 006681 | | 9.52 | |
| 006682 | | 11.67 | |
| 006683 | | −3.12 | |
| 006684 | | 21.49 | |
| 006685 | | 61.73 | |
| 006686 | | 68.24 | |
| 006687 | | 68.61 | |
| 006688 | | 92.89 | |
| 006689 | | −6.54 | |
| 006690 | | −4.19 | |
| 006691 | | −4.72 | |
| 006692 | | −15.84 | |
| 006693 | | −29.61 | |
| 006694 | | −30.74 | |
| 006695 | | 52.27 | |
| 006696 | | 38.76 | |
| 006697 | | 13.29 | |
| 006698 | | −4.94 | |
| 006699 | | 31.60 | |
| 006700 | | 98.85 | |
| 006701 | | 19.40 | |
| 006702 | | 55.72 | |
| 006703 | | 10.08 | |
| 006704 | | 43.55 | |
| 006705 | | −11.86 | |
| 006706 | | 73.23 | |
| 006707 | | 82.89 | |
| 006708 | | 6.26 | |
| 006709 | | 85.24 | |
| 006710 | | 10.85 | |
| 006711 | | 21.66 | |
| 006712 | | 89.98 | |
| 006713 | | 89.08 | |
| 006714 | | 88.46 | |
| 006715 | | 86.61 | |
| 006716 | | 98.14 | |
| 006717 | | 76.37 | |
| 006718 | | 54.91 | |
| 006719 | | 9.05 | |
| 006720 | | −12.37 | |
| 006721 | | 9.42 | |
| 006722 | | 10.57 | |
| 006723 | | −33.60 | |
| 006724 | | −24.76 | |
| 006725 | | −4.64 | |
| 006726 | | −58.51 | |
| 006727 | | 2.01 | |
| 006728 | | 14.83 | |
| 006729 | | −11.20 | |
| 006730 | | 24.05 | |
| 006731 | | 1.76 | |
| 006732 | | 1.45 | |
| 006733 | | −33.44 | |
| 006734 | | −19.26 | |
| 006735 | | 3.51 | |
| 006736 | | −17.79 | |
| 006737 | | −23.12 | |
| 006738 | | −1.94 | |
| 006739 | | −10.54 | |
| 006740 | | −19.34 | |
| 006741 | | 4.52 | |
| 006742 | | 20.61 | |
| 006743 | | 49.39 | |
| 006744 | | 26.67 | |
| 006745 | | 1.67 | |
| 006746 | | −14.69 | |
| 006747 | | 71.41 | |
| 006748 | | −9.20 | |
| 006749 | | −4.77 | |
| 006750 | | 36.48 | |
| 006751 | | 32.62 | |
| 006752 | | −2.29 | |
| 006753 | | 33.15 | |
| 007825 | 90.91 | 6.25 | |
| 007826 | 98.45 | 19.41 | |
| 007827 | 33.89 | 76.63 | |
| 007828 | 71.22 | 14.19 | |
| 007829 | 89.09 | 24.77 | |
| 007830 | 69.02 | 45.88 | |
| 007831 | 52.61 | 65.25 | |
| 007832 | 45.77 | 64.13 | |
| 007833 | 35.27 | 66.93 | |
| 007834 | 55.75 | 69.23 | |
| 007835 | 50.44 | 62.14 | |
| 007836 | 83.57 | 1.61 | |
| 007837 | 21.27 | 49.39 | |
| 007838 | 38.67 | 29.18 | |
| 007839 | 15.87 | 67.92 | |
| 007840 | 31.14 | 39.74 | |
| 007841 | 93.61 | 8.20 | |
| 007842 | 33.20 | 39.43 | |
| 007843 | 72.64 | −3.50 | |
| 007844 | 30.46 | 58.52 | |
| 007845 | 36.50 | 37.25 | |
| 007846 | 65.57 | 16.35 | |
| 007847 | 54.41 | 9.77 | |
| 007848 | 44.89 | 26.42 | |
| 007849 | 63.62 | 10.09 | |
| 007850 | 25.40 | 22.71 | |
| 007851 | 72.80 | 3.37 | |
| 007852 | 30.09 | 22.42 | |
| 007853 | 35.11 | 67.33 | |
| 007854 | 46.62 | 18.67 | |
| 007855 | 28.38 | 81.42 | |
| 007856 | 30.19 | 45.29 | |
| 007857 | 36.65 | 51.05 | |
| 007858 | 31.33 | 60.45 | |
| 007859 | 9.22 | 58.74 | |
| 007860 | 99.21 | 4.04 | |
| 007861 | 19.20 | 36.21 | |
| 007862 | 27.80 | 34.54 | |
| 007863 | 35.15 | 50.15 | |
| 007864 | 13.78 | 57.98 | |
| 007865 | 31.57 | 36.37 | |
| 007866 | 83.12 | −9.69 | |
| 007867 | 83.71 | 13.53 | |
| 007868 | 81.70 | 33.84 | |
| 007869 | 9.38 | 21.24 | |
| 007870 | 25.74 | 21.96 | |
| 007871 | 59.12 | 18.39 | |
| 007872 | 81.08 | 14.20 | |
| 007873 | 79.14 | 24.50 | |
| 007874 | 29.03 | 7.04 | |
| 007875 | 72.85 | 13.88 | |
| 007876 | 89.11 | −5.50 | |
| 007877 | 71.59 | 34.39 | |
| 007878 | 53.55 | 75.38 | |
| 007879 | 30.00 | 65.89 | |
| 007880 | 27.63 | 48.64 | |
| 007881 | 18.64 | 55.32 | |
| 007882 | 31.80 | 44.28 | |
| 007883 | 14.24 | 61.01 | |
| 007884 | 13.69 | 65.37 | |
| 007885 | 7.65 | 83.34 | |
| 007886 | 25.22 | 73.06 | |
| 007887 | 12.83 | 73.68 | |
| 007888 | 8.62 | 70.07 | |
| 007889 | 23.48 | 54.75 | |
| 007890 | 14.76 | 62.18 | |
| 007891 | 34.07 | 16.50 | |
| 007892 | 25.34 | 49.17 | |
| 007893 | 41.07 | 21.97 | |
| 007894 | 34.40 | 44.36 | |
| 007895 | 19.12 | 68.86 | |
| 007896 | 22.59 | 40.30 | |
| 007897 | 27.09 | 30.03 | |
| 007898 | 29.06 | 29.97 | |
| 007899 | 11.40 | 60.32 | |
| 007900 | 16.92 | 57.20 | |
| 007901 | 18.70 | 48.75 | |
| 007902 | 19.97 | 44.39 | |
| 007903 | 58.49 | 8.26 | |
| 007904 | 50.08 | 33.45 | |
| 007905 | 89.08 | 1.68 | |
| 007906 | 43.31 | 10.34 | |
| 007907 | 51.83 | −14.10 | |
| 007908 | 43.19 | −31.83 | |
| 007909 | 47.18 | 7.85 | |
| 007910 | 53.39 | 20.72 | |
| 007911 | 21.84 | 50.54 | |
| 007912 | 61.80 | 13.34 | |
| 007913 | 20.16 | 50.15 | |
| 007914 | 30.22 | 52.23 | |
| 007915 | 17.21 | 57.41 | |
| 007916 | 31.52 | 41.55 | |
| 007917 | 34.69 | 37.70 | |
| 007918 | 52.90 | 11.77 | |
| 007919 | 88.65 | 12.37 | |
| 007920 | 76.86 | 9.80 | |
| 007921 | 8.59 | 69.61 | |
| 007922 | 20.82 | 51.06 | |
| 007923 | 43.75 | 24.38 | |
| 007924 | 11.96 | 54.98 | |
| 007925 | 12.70 | 65.01 | |
| 007926 | 68.37 | 2.64 | |
| 007927 | 7.64 | 48.49 | |
| 007928 | 81.26 | 21.17 | |
| 007929 | 21.74 | 53.63 | |
| 007930 | 44.83 | 57.41 | |
| 007931 | 24.55 | 58.90 | |
| 007932 | 28.59 | 73.25 | |
| 007933 | 34.94 | 57.41 | |
| 007934 | 12.19 | 67.62 | |
| 007935 | 13.19 | 73.08 | |
| 007936 | 6.99 | 91.64 | |
| 007937 | 10.02 | 84.05 | |
| 007938 | 6.06 | 88.94 | |
| 007939 | 5.53 | 88.11 | |
| 007940 | 11.10 | 81.11 | |
| 007941 | 10.93 | 87.49 | |
| 007942 | 6.06 | 94.37 | |
| 007943 | 8.99 | 83.43 | |
| 007944 | 78.30 | 10.37 | |
| 007945 | 55.03 | 25.03 | |
| 007946 | 47.58 | 21.46 | |
| 007947 | 82.61 | −14.05 | |
| 007948 | 62.42 | 16.02 | |
| 007949 | 106.76 | −18.93 | |
| 007950 | 66.12 | −21.13 | |
| 007951 | 82.92 | −3.02 | |
| 007952 | 98.71 | −15.24 | |
| 007953 | 82.13 | −22.52 | |
| 007954 | 99.46 | −9.90 | |
| 007955 | 101.97 | −22.11 | |
| 007956 | 101.43 | −25.78 | |
| 007957 | 80.47 | −0.57 | |
| 007958 | 12.52 | 41.42 | |
| 007959 | 34.82 | 9.60 | |
| 007960 | 42.45 | 48.38 | |
| 007961 | 11.01 | 68.82 | |
| 007962 | 12.20 | 38.28 | |
| 007963 | 9.45 | 69.16 | |
| 007964 | 11.29 | 49.13 | |
| 007965 | 42.52 | 14.76 | |
| 007966 | 87.30 | −13.68 | |
| 007967 | 16.55 | 45.65 | |
| 007968 | 55.58 | −4.50 | |
| 007969 | 37.76 | 30.76 | |
| 007970 | 24.28 | 30.57 | |
| 007971 | 14.79 | 62.40 | |
| 007972 | 28.84 | 44.82 | |
| 007973 | 39.65 | 58.60 | |
| 007974 | 20.24 | 57.13 | |
| 007975 | 31.21 | 20.78 | |
| 007976 | 24.51 | 37.98 | |
| 007977 | 17.80 | 59.12 | |
| 007978 | 47.91 | 21.70 | |
| 007979 | 72.76 | 4.55 | |
| 007980 | 61.27 | 22.58 | |
| 007981 | 62.59 | 1.68 | |
| 007982 | 59.81 | 22.75 | |
| 007983 | 87.07 | 12.00 | |
| 007984 | 78.59 | 19.42 | |
| 007985 | 82.91 | 16.85 | |
| 007986 | 90.68 | 26.26 | |
| 007987 | 39.02 | 41.88 | |
| 007988 | 52.78 | 1.91 | |
| 007989 | 33.16 | 36.14 | |
| 007990 | 28.31 | 52.08 | |
| 007991 | 68.28 | 9.73 | |
| 007992 | 78.17 | 26.84 | |
| 007993 | 83.36 | 6.25 | |
| 007994 | 52.99 | 33.90 | |
| 007995 | 90.92 | 11.29 | |
| 007996 | 78.60 | 8.99 | |
| 007997 | 79.65 | −6.28 | |
| 007998 | 102.82 | −1.89 | |
| 007999 | 121.19 | 16.07 | |
| 008000 | 130.28 | 15.99 | |
| 008001 | 84.59 | 16.10 | |
| 008002 | 95.26 | 17.26 | |
| 008003 | 106.06 | −1.76 | |
| 008004 | 41.49 | 53.55 | |
| 008005 | 55.92 | 24.61 | |
| 008006 | 42.94 | 60.56 | |
| 008007 | 65.62 | 41.22 | |
| 008008 | 27.91 | 57.41 | |
| 008009 | 38.76 | 47.35 | |
| 008010 | 42.55 | 51.20 | |
| 008011 | 42.50 | 39.28 | |
| 008012 | 25.60 | 71.89 | |
| 008013 | 20.03 | 79.57 | |
| 008014 | 13.24 | 77.03 | |
| 008015 | 47.33 | 32.67 | |
| 008016 | 3.93 | 86.61 | |
| 008017 | 55.12 | 51.88 | |
| 008018 | 41.16 | 55.37 | |
| 008019 | 32.70 | 48.13 | |
| 008020 | 46.11 | 30.25 | |
| 008021 | 41.00 | 30.87 | |
| 008022 | 40.06 | 50.34 | |
| 008023 | 30.02 | 62.98 | |
| 008024 | 31.84 | 58.58 | |
| 008025 | 21.50 | 71.54 | |
| 008026 | 36.54 | 60.73 | |
| 008027 | 26.61 | 48.43 | |
| 008028 | 37.71 | 56.71 | |
| 008029 | 42.03 | 61.10 | |
| 008030 | 66.16 | 48.68 | |
| 008031 | 62.90 | 45.58 | |
| 008032 | 26.91 | 80.00 | |
| 008033 | 9.31 | 86.60 | |
| 008034 | 36.73 | 64.43 | |
| 008035 | 20.72 | 70.12 | |
| 008036 | 35.45 | 39.31 | |
| 008037 | 11.98 | 84.20 | |
| 008038 | 68.54 | 25.69 | |
| 008039 | 83.82 | 19.31 | |
| 008040 | 119.54 | 6.64 | |
| 008041 | 70.09 | 28.57 | |
| 008042 | 96.16 | 23.09 | |
| 008043 | 110.12 | 7.64 | |
| 008044 | 85.13 | −3.82 | |
| 008045 | 18.20 | 47.29 | |
| 008046 | 9.30 | 70.65 | |
| 008047 | 19.37 | 74.12 | |
| 008048 | 108.64 | 14.06 | |
| 008049 | 78.36 | 32.38 | |
| 008050 | 10.02 | 70.37 | |
| 008051 | 14.29 | 77.77 | |
| 008052 | 59.21 | 46.51 | |
| 008053 | 30.41 | 42.57 | |
| 008054 | 34.03 | 70.45 | |
| 008055 | 100.68 | 25.49 | |
| 008056 | 36.85 | 70.50 | |
| 008057 | 26.69 | 66.36 | |
| 008058 | 69.46 | 14.96 | |
| 008059 | 76.20 | 17.89 | |
| 008060 | 101.05 | −42.04 | |
| 008061 | 55.16 | 4.51 | |
| 008062 | 107.80 | 5.19 | |
| 008063 | 95.54 | 13.90 | |
| 008064 | 111.74 | 0.48 | |
| 008065 | 99.24 | 6.89 | |
| 008066 | 49.03 | 35.04 | |
| 008067 | 86.71 | −30.43 | |
| 008068 | 42.88 | 23.93 | |
| 008069 | 17.31 | 59.72 | |
| 008070 | 12.73 | 82.15 | |
| 008071 | 13.36 | 74.35 | |
| 008072 | 12.81 | 74.31 | |
| 008073 | 14.85 | 78.37 | |
| 008074 | 5.77 | 97.91 | |
| 008075 | 6.60 | 90.35 | |
| 008076 | 9.52 | 56.26 | |
| 008077 | 29.81 | 65.59 | |
| 008078 | 16.32 | 74.58 | |
| 008079 | 20.19 | 72.81 | |
| 008080 | 11.00 | 62.17 | |
| 008081 | 43.93 | 18.16 | |
| 008082 | 45.23 | 32.77 | |
| 008083 | 9.93 | 81.06 | |
| 008084 | 50.27 | 10.40 | |
| 008085 | 17.52 | 38.06 | |
| 008086 | 26.27 | 40.21 | |
| 008087 | 46.71 | 17.50 | |
| 008088 | 69.77 | 22.57 | |
| 008089 | 82.95 | 7.77 | |
| 008090 | 50.97 | 42.26 | |
| 008091 | 75.98 | −5.32 | |
| 008092 | 50.82 | 22.12 | |
| 008093 | 98.53 | 35.95 | |
| 008094 | 58.36 | 32.04 | |
| 008095 | 78.20 | 26.56 | |
| 008096 | 76.52 | 24.98 | |
| 008097 | 89.41 | 16.03 | |
| 008098 | 56.14 | 26.76 | |
| 008099 | 53.69 | 23.21 | |
| 008100 | 53.79 | 57.71 | |
| 008101 | 19.59 | 86.78 | |
| 008102 | 16.83 | 92.56 | |
| 008103 | 25.45 | 89.09 | |
| 008104 | 15.10 | 96.32 | |
| 008105 | 37.83 | 30.57 | |
| 008106 | 12.27 | 81.49 | |
| 008107 | 39.07 | 74.08 | |
| 008108 | 16.37 | 56.89 | |
| 008109 | 65.37 | 30.94 | |
| 008110 | 84.01 | 21.59 | |
| 008111 | 23.27 | 52.20 | |
| 008112 | 26.26 | 33.34 | |
| 008113 | 70.31 | 33.66 | |
| 008114 | 24.58 | 32.88 | |
| 008115 | 26.53 | 47.18 | |
| 008116 | 59.72 | 21.30 | |
| 008117 | 28.89 | 86.00 | |
| 008118 | 22.13 | 88.23 | |
| 008119 | 31.41 | 77.00 | |
| 008120 | 25.55 | 86.25 | |
| 008121 | 24.84 | 67.70 | |
| 008122 | 39.61 | 65.84 | |
| 008123 | 35.93 | 68.46 | |
| 008124 | 51.95 | 83.26 | |
| 008125 | 41.28 | 84.75 | |
| 008126 | 24.86 | 85.98 | |
| 008127 | 19.61 | 94.88 | |
| 008128 | 24.70 | 77.51 | |
| 008129 | 33.16 | 76.42 | |
| 008130 | 36.10 | 74.97 | |
| 008131 | 33.30 | 80.49 | |
| 008132 | 31.82 | 68.74 | |
| 008133 | 3.07 | 71.27 | |
| 008134 | 5.25 | 70.33 | |
| 008135 | 11.95 | 66.23 | |
| 008136 | 9.70 | 76.98 | |
| 008137 | 13.17 | 73.27 | |
| 008138 | 18.84 | 65.30 | |
| 008139 | 17.79 | 77.58 | |
| 008140 | 18.27 | 55.79 | |
| 008141 | 48.99 | 39.55 | |
| 008142 | 28.53 | 64.64 | |
| 008143 | 37.91 | 29.96 | |
| 008144 | 78.90 | −1.50 | |
| 008145 | 37.15 | 31.34 | |
| 008146 | 75.86 | 19.37 | |
| 008147 | 104.08 | 13.91 | |
| 008148 | 13.32 | 76.17 | |
| 008149 | 137.45 | −5.70 | |
| 008150 | 60.94 | 34.50 | |
| 008151 | 124.55 | 17.51 | |
| 008152 | 115.55 | 17.26 | |
| 008153 | 34.90 | 27.56 | |
| 008154 | 60.02 | 31.91 | |
| 008155 | 69.99 | 17.34 | |
| 008156 | 72.62 | 6.97 | |
| 008157 | 84.96 | 12.07 | |
| 008158 | 8.73 | 74.48 | |
| 008159 | 20.63 | 61.75 | |
| 008160 | 51.87 | 34.32 | |
| 008161 | 32.85 | 57.35 | |
| 008162 | 52.45 | 15.77 | |
| 008163 | 38.43 | 32.49 | |
| 008164 | 43.21 | 30.95 | |
| 008165 | 49.33 | 30.98 | |
| 008166 | 41.27 | 39.31 | |
| 008167 | 7.28 | 84.28 | |
| 008168 | 24.84 | 56.84 | |
| 008169 | 81.47 | 34.33 | |
| 008170 | 4.61 | 81.51 | |
| 008171 | 87.01 | 3.32 | |
| 008172 | 67.12 | 10.72 | |
| 008173 | 36.71 | 37.49 | |
| 008174 | 45.09 | 30.14 | |
| 008175 | 28.76 | 30.23 | |
| 008176 | 36.56 | 19.39 | |
| 008177 | 31.67 | 43.28 | |
| 008178 | 70.95 | 24.84 | |
| 008179 | 38.16 | −0.99 | |
| 008180 | 40.51 | 8.33 | |
| 008181 | 17.10 | 47.31 | |
| 008182 | 6.84 | 61.68 | |
| 008183 | 30.96 | 46.12 | |
| 008184 | 62.32 | 30.55 | |
| 008185 | 9.01 | 69.14 | |
| 008186 | 9.92 | 50.59 | |
| 008187 | 47.88 | 2.74 | |
| 008188 | 18.65 | 31.05 | |
| 008189 | 15.14 | 36.37 | |
| 008190 | 28.38 | 15.26 | |
| 008191 | 89.01 | 15.35 | |
| 008192 | 42.88 | 28.79 | |
| 008193 | 90.34 | 3.80 | |
| 008194 | 31.19 | 4.70 | |
| 008195 | 105.33 | −4.79 | |
| 008196 | 90.57 | 11.53 | |
| 008197 | 83.58 | 12.39 | |
| 008198 | 96.91 | −19.15 | |
| 008199 | 86.43 | −1.40 | |
| 008200 | 7.56 | 65.95 | |
| 008201 | 106.12 | 16.42 | |
| 008202 | 47.01 | 30.68 | |
| 008203 | 79.32 | −16.59 | |
| 008204 | 22.33 | −3.98 | |
| 008205 | 34.90 | 4.62 | |
| 008206 | 49.12 | 3.70 | |
| 008207 | 103.20 | 27.65 | |
| 008208 | 44.64 | 18.07 | |
| 008209 | 54.40 | 0.01 | |
| 008210 | 45.03 | 4.90 | |
| 008211 | 18.70 | −11.25 | |
| 008212 | 23.47 | 23.14 | |
| 008213 | 47.65 | 28.77 | |
| 008214 | 35.89 | 29.45 | |
| 008215 | 34.78 | 35.62 | |
| 008216 | 28.59 | 36.29 | |
| 008217 | 10.25 | 26.47 | |
| 008218 | 11.69 | 26.70 | |
| 008219 | 21.85 | 12.37 | |
| 008220 | 15.12 | 92.25 | |
| 008221 | 15.26 | 72.03 | |
| 008222 | 18.42 | 33.49 | |
| 008223 | 13.85 | 48.58 | |
| 008224 | 22.35 | 37.14 | |
| 008225 | 4.69 | 69.70 | |
| 008226 | 3.61 | 84.00 | |
| 008227 | 8.25 | 72.26 | |
| 008228 | 6.29 | 62.28 | |
| 008229 | 30.82 | 40.19 | |
| 008230 | 7.61 | 73.25 | |
| 008231 | 56.26 | 31.85 | |
| 008232 | 66.56 | 46.57 | |
| 008233 | 54.78 | 15.43 | |
| 008234 | 12.17 | 66.92 | |
| 008235 | 112.23 | 0.09 | |
| 008236 | 98.75 | −22.49 | |
| 008237 | 41.06 | 38.16 | |
| 008238 | 22.39 | 74.20 | |
| 008239 | 23.22 | 74.19 | |
| 008240 | 17.68 | 80.49 | |
| 008241 | 66.10 | 20.58 | |
| 008242 | 29.17 | 14.26 | |
| 008243 | 84.73 | −18.67 | |
| 008244 | 20.68 | 39.38 | |
| 008245 | 12.92 | 53.15 | |
| 008246 | 8.80 | 48.85 | |
| 008247 | 17.59 | 43.71 | |
| 008248 | 21.26 | 15.95 | |
| 008249 | 14.25 | 47.75 | |
| 008250 | 7.25 | 79.18 | |
| 008251 | 9.17 | 60.46 | |
| 008252 | 10.00 | 63.76 | |
| 008253 | 81.03 | −15.99 | |
| 008254 | 32.11 | 18.35 | |
| 008255 | 83.84 | −0.91 | |
| 008256 | 58.17 | 3.07 | |
| 008257 | 6.53 | 60.92 | |
| 008258 | 24.24 | 27.57 | |
| 008259 | 8.86 | 63.53 | |
| 008260 | 7.43 | 52.54 | |
| 008261 | 4.74 | 80.82 | |
| 008262 | 43.21 | 6.68 | |
| 008263 | 37.38 | 18.63 | |
| 008264 | 51.77 | −13.47 | |
| 008265 | 73.34 | −12.22 | |
| 008266 | 74.99 | −4.89 | |
| 008267 | 96.96 | 5.59 | |
| 008268 | 54.16 | 14.67 | |
| 008269 | 69.52 | −7.42 | |
| 008270 | 102.07 | −23.69 | |
| 008271 | 98.12 | −2.72 | |
| 008272 | 53.29 | 14.89 | |
| 008273 | 105.43 | 0.23 | |
| 008274 | 67.65 | 11.74 | |
| 008275 | 117.82 | −23.52 | |
| 008276 | 111.38 | −14.08 | |
| 008277 | 115.30 | −24.91 | |
| 008278 | 56.02 | 1.19 | |
| 008279 | 80.79 | 47.99 | |
| 008280 | 56.83 | 76.04 | |
| 008281 | 70.71 | 18.03 | |
| 008282 | 75.86 | 2.95 | |
| 008283 | 46.04 | 5.69 | |
| 008284 | 35.78 | 23.82 | |
| 008285 | 45.24 | 8.41 | |
| 008286 | 45.76 | 29.08 | |
| 008287 | 93.27 | 9.04 | |
| 008288 | 72.46 | 1.81 | |
| 008289 | 72.71 | 2.26 | |
| 008290 | 24.01 | 18.96 | |
| 008291 | 25.01 | 1.77 | |
| 008292 | 22.67 | 13.43 | |
| 008293 | 26.72 | 13.31 | |
| 008294 | 91.83 | −7.23 | |
| 008295 | 15.97 | 41.66 | |
| 008296 | 10.68 | 44.06 | |
| 008297 | 22.31 | 34.51 | |
| 008298 | 40.79 | 28.28 | |
| 008299 | 15.52 | 61.12 | |
| 008300 | 40.04 | 31.97 | |
| 008301 | 12.72 | 39.45 | |
| 008302 | 71.43 | −8.15 | |
| 008303 | 92.63 | −28.14 | |
| 008304 | 56.89 | −8.90 | |
| 008305 | 57.90 | 30.25 | |
| 008306 | 82.97 | 53.57 | |
| 008307 | 97.02 | 4.31 | |
| 008308 | 92.71 | −10.91 | |
| 008309 | 77.69 | −23.36 | |
| 008310 | 81.48 | 2.06 | |
| 008311 | 72.07 | −35.71 | |
| 008312 | 53.23 | 24.35 | |
| 008313 | 62.65 | 1.63 | |
| 008314 | 69.03 | 8.83 | |
| 008315 | 24.45 | 10.47 | |
| 008316 | 23.44 | 12.02 | |
| 008317 | 34.87 | 16.77 | |
| 008318 | 30.38 | 44.13 | |
| 008319 | 36.15 | 27.49 | |
| 008320 | 58.43 | 29.61 | |
| 008321 | 54.72 | 34.66 | |
| 008322 | 52.18 | 18.69 | |
| 008323 | 93.13 | 10.44 | |
| 008324 | 95.24 | 2.58 | |
| 008325 | 83.16 | 8.86 | |
| 008326 | 99.56 | 4.41 | |
| 008327 | 65.57 | 0.34 | |
| 008328 | 105.10 | −12.65 | |
| 008329 | 74.61 | 17.91 | |
| 008330 | 108.70 | −22.11 | |
| 008331 | 83.72 | −9.12 | |
| 008332 | 79.35 | −15.30 | |
| 008333 | 58.45 | −15.82 | |
| 008334 | 60.79 | 40.00 | |
| 008335 | 66.22 | 41.79 | |
| 008336 | 88.87 | 60.12 | |
| 008337 | 97.55 | 24.43 | |
| 008338 | 84.91 | 10.25 | |
| 008339 | 97.28 | 31.05 | |
| 008340 | 103.42 | 5.22 | |
| 008341 | 79.11 | −5.51 | |
| 008342 | 106.42 | −12.19 | |
| 008343 | 17.32 | 48.63 | |
| 008344 | 102.86 | −26.65 | |
| 008345 | 77.52 | 24.80 | |
| 008346 | 92.45 | −17.45 | |
| 008347 | 95.63 | −8.04 | |
| 008348 | 65.16 | −6.42 | |
| 008349 | 78.78 | −15.57 | |
| 008350 | 88.65 | −15.28 | |
| 008351 | 27.60 | 52.68 | |
| 008352 | 5.62 | 79.17 | |
| 008353 | 71.84 | 28.85 | |
| 008354 | 13.57 | 60.26 | |
| 008355 | 2.67 | 68.53 | |
| 008356 | 21.07 | 45.91 | |
| 008357 | 20.67 | 42.12 | |
| 008358 | 6.52 | 84.78 | |
| 008359 | 10.20 | 76.95 | |
| 008360 | 6.76 | 80.77 | |
| 008361 | 10.71 | 67.80 | |
| 008362 | 5.16 | 67.30 | |
| 008363 | 64.44 | −23.84 | |
| 008364 | 30.17 | 9.59 | |
| 008365 | 76.68 | 2.17 | |
| 008366 | 60.36 | 11.19 | |
| 008367 | 45.28 | 40.74 | |
| 008368 | 69.18 | 37.04 | |
| 008369 | 84.30 | 5.53 | |
| 008370 | 3.19 | 62.48 | |
| 008371 | 22.45 | 12.41 | |
| 008372 | 7.45 | 28.50 | |
| 008373 | 43.39 | 0.89 | |
| 008374 | 48.11 | −10.71 | |
| 008375 | 46.35 | 22.48 | |
| 008376 | 11.27 | 81.58 | |
| 008377 | 53.22 | 2.35 | |
| 008378 | 12.41 | 65.59 | |
| 008379 | 7.05 | 68.90 | |
| 008380 | 12.44 | 64.66 | |
| 008381 | 17.12 | 64.21 | |
| 008382 | 46.94 | 52.68 | |
| 008383 | 14.70 | 61.67 | |
| 008384 | 6.60 | 77.21 | |
| 008385 | 2.07 | 100.40 | |
| 008386 | 3.23 | 93.44 | |
| 008387 | 3.80 | 97.24 | |
| 008388 | 2.82 | 97.77 | |
| 008389 | 5.90 | 83.57 | |
| 008390 | 34.56 | 49.25 | |
| 008391 | 8.18 | 72.24 | |
| 008392 | 69.95 | 25.72 | |
| 008393 | 41.15 | 38.39 | |
| 008394 | 57.07 | 48.37 | |
| 008395 | 36.53 | 58.28 | |
| 008396 | 69.58 | 19.29 | |
| 008397 | 88.93 | 3.38 | |
| 008398 | 94.58 | 4.35 | |
| 008399 | 91.83 | 17.41 | |
| 008400 | 94.57 | 10.66 | |
| 008401 | 78.87 | 2.52 | |
| 008402 | 77.69 | 16.13 | |
| 008403 | 85.76 | −10.19 | |
| 008404 | 99.57 | 16.74 | |
| 008405 | 52.54 | 22.39 | |
| 008406 | 41.35 | 20.70 | |
| 008407 | 87.19 | 16.92 | |
| 008408 | 84.72 | −11.70 | |
| 008409 | 50.08 | 33.39 | |
| 008410 | 43.50 | 2.69 | |
| 008411 | 89.13 | −40.63 | |
| 008418 | 7.61 | 39.27 | |
| 008419 | 29.46 | 33.86 | |
| 008420 | 119.06 | −2.42 | |
| 008421 | 105.01 | −21.43 | |
| 008422 | 81.48 | −22.75 | |
| 008423 | 41.55 | −1.35 | |
| 008424 | 46.88 | 12.78 | |
| 008425 | 49.52 | 45.96 | |
| 008426 | 63.30 | 13.89 | |
| 008427 | 50.14 | 26.28 | |
| 008428 | 40.91 | 22.32 | |
| 008429 | 53.49 | 2.76 | |
| 008430 | 68.65 | 4.67 | |
| 008431 | 33.62 | 54.21 | |
| 008432 | 51.46 | 38.70 | |
| 008433 | 62.43 | 39.14 | |
| 008434 | 31.83 | 40.49 | |
| 008435 | 20.66 | 51.87 | |
| 008436 | 41.54 | 35.26 | |
| 008437 | 29.68 | 49.20 | |
| 008438 | 38.82 | 24.98 | |
| 008439 | 35.66 | −5.69 | |
| 008440 | 42.72 | 10.94 | |
| 008441 | 53.95 | −10.45 | |
| 008442 | 23.72 | 16.38 | |
| 008443 | 25.61 | −6.29 | |
| 008444 | 40.16 | 2.56 | |
| 008445 | 41.81 | 7.16 | |
| 008446 | 88.89 | 5.84 | |
| 008447 | 38.91 | 32.29 | |
| 008448 | 108.85 | 1.08 | |
| 008449 | 79.14 | 7.22 | |
| 008450 | 94.26 | −25.65 | |
| 008451 | 91.31 | −32.08 | |
| 008452 | 82.11 | −39.17 | |
| 008453 | 73.97 | −29.90 | |
| 008454 | 74.64 | 3.68 | |
| 008455 | 106.24 | 34.24 | |
| 008456 | 103.54 | −18.60 | |
| 008457 | 101.19 | −17.45 | |
| 008458 | 36.74 | 43.65 | |
| 008459 | 40.34 | 38.13 | |
| 008460 | 48.90 | 23.25 | |
| 008461 | 55.67 | 67.84 | |
| 008462 | 69.33 | 37.95 | |
| 008463 | 20.10 | 78.14 | |
| 008464 | 85.74 | −27.49 | |
| 008465 | 74.12 | 15.11 | |
| 008466 | 65.57 | −35.99 | |
| 008467 | 57.61 | −31.57 | |
| 008468 | 28.73 | −4.08 | |
| 008469 | 81.82 | −15.33 | |
| 008470 | 50.25 | 9.74 | |
| 008471 | 39.69 | 47.91 | |
| 008472 | 67.79 | 2.14 | |
| 008473 | 53.58 | 1.73 | |
| 008474 | 56.28 | 9.80 | |
| 008475 | 65.69 | 47.96 | |
| 008476 | 54.24 | 39.98 | |
| 008477 | 104.37 | −3.39 | |
| 008478 | 95.67 | 20.07 | |
| 008479 | 112.06 | 28.12 | |
| 008480 | 66.46 | 54.30 | |
| 008481 | 94.72 | 4.55 | |
| 008482 | 110.11 | 8.57 | |
| 008483 | 112.36 | 8.26 | |
| 008484 | 68.41 | −1.04 | |
| 008485 | 75.62 | 41.62 | |
| 008486 | 106.62 | 20.41 | |
| 008487 | 88.40 | 55.72 | |
| 008488 | 84.72 | 30.21 | |
| 008489 | 99.75 | 9.47 | |
| 008490 | 95.25 | 3.31 | |
| 008491 | 71.03 | 20.76 | |
| 008492 | 58.37 | 22.56 | |
| 008493 | 58.13 | 37.50 | |
| 008494 | 80.75 | 37.30 | |
| 008495 | 95.86 | 24.74 | |
| 008496 | 57.89 | 40.77 | |
| 008497 | 27.16 | 21.81 | |
| 008498 | 83.08 | 1.76 | |
| 008499 | 87.91 | 6.76 | |
| 008500 | 25.94 | 29.28 | |
| 008501 | 1.72 | 87.42 | |
| 008502 | 1.61 | 69.55 | |
| 008503 | 34.25 | 52.85 | |
| 008504 | 29.28 | −7.25 | |
| 008505 | 40.18 | 47.18 | |
| 008506 | 60.75 | 0.04 | |
| 008507 | 41.83 | 21.51 | |
| 008508 | 34.91 | 37.89 | |
| 008509 | 71.80 | −14.64 | |
| 008510 | 80.61 | −6.40 | |
| 008511 | 5.69 | 64.19 | |
| 008512 | 38.68 | 24.76 | |
| 008513 | 4.28 | 78.53 | |
| 008514 | 50.75 | 7.70 | |
| 008515 | 13.34 | 25.84 | |
| 008516 | 12.16 | 45.28 | |
| 008517 | 33.59 | 13.29 | |
| 008518 | 11.39 | 49.67 | |
| 008519 | 32.53 | 38.83 | |
| 008520 | 21.77 | 59.27 | |
| 008521 | 28.90 | 62.73 | |
| 008522 | 31.55 | 46.54 | |
| 008523 | 66.82 | −21.00 | |
| 008524 | 86.26 | −62.50 | |
| 008525 | 112.10 | −16.24 | |
| 008526 | 94.70 | 2.50 | |
| 008527 | 72.96 | 12.66 | |
| 008528 | 93.18 | −7.03 | |
| 008529 | 1.88 | 99.04 | |
| 008530 | 2.27 | 91.35 | |
| 008531 | 1.39 | 80.64 | |
| 008532 | 1.04 | 91.15 | |
| 008533 | 1.19 | 87.02 | |
| 008534 | 3.73 | 82.31 | |
| 008535 | 3.28 | 77.58 | |
| 008536 | 1.11 | 86.48 | |
| 008537 | 4.74 | 68.14 | |
| 008538 | 21.35 | 59.00 | |
| 008539 | 10.28 | 62.40 | |
| 008540 | 18.97 | 42.59 | |
| 008541 | 27.06 | 60.19 | |
| 008542 | 28.41 | 44.08 | |
| 008543 | 4.66 | 72.34 | |
| 008544 | 4.73 | 73.86 | |
| 008545 | 4.19 | 81.08 | |
| 008546 | 6.06 | 62.56 | |
| 008547 | 20.33 | 32.30 | |
| 008548 | 76.10 | −59.95 | |
| 008549 | 90.60 | −74.35 | |
| 008550 | 96.18 | 4.99 | |
| 008551 | 80.34 | 26.28 | |
| 008552 | 27.93 | 25.41 | |
| 008553 | 19.38 | 20.13 | |
| 008554 | 18.12 | 44.27 | |
| 008555 | 27.78 | 40.95 | |
| 008556 | 19.94 | 51.94 | |
| 008557 | 23.20 | 42.43 | |
| 008558 | 14.23 | 47.73 | |
| 008559 | 19.26 | 49.24 | |
| 008560 | 15.41 | 48.03 | |
| 008561 | 12.91 | 73.32 | |
| 008562 | 106.19 | −22.88 | |
| 008563 | 52.52 | −0.19 | |
| 008564 | 59.22 | −16.32 | |
| 008565 | 74.50 | −36.52 | |
| 008566 | 39.32 | 5.59 | |
| 008567 | 86.82 | 7.62 | |
| 008568 | 62.94 | 4.97 | |
| 008569 | 56.64 | 34.24 | |
| 008570 | 84.80 | −3.60 | |
| 008571 | 29.00 | −7.70 | |
| 008572 | 36.07 | −10.85 | |
| 008573 | 19.27 | 22.46 | |
| 008574 | 14.29 | 21.12 | |
| 008575 | 22.21 | 43.66 | |
| 008576 | 21.97 | 54.57 | |
| 008577 | 25.21 | 26.23 | |
| 008578 | 16.70 | 56.13 | |
| 008579 | 9.88 | 56.33 | |
| 008580 | 14.69 | 21.29 | |
| 008581 | 31.82 | 20.19 | |
| 008582 | 5.37 | 79.00 | |
| 008583 | 10.01 | 71.97 | |
| 008584 | 1.50 | 94.47 | |
| 008585 | 27.78 | 32.87 | |
| 008586 | 38.37 | 3.21 | |
| 008587 | 61.87 | 14.52 | |
| 008588 | 39.07 | 21.39 | |
| 008589 | 30.36 | 7.73 | |
| 008590 | 77.32 | 26.31 | |
| 008591 | 66.39 | 23.41 | |
| 008592 | 83.33 | −2.62 | |
| 008593 | 87.31 | −46.33 | |
| 008594 | 91.50 | −20.13 | |
| 008595 | 84.56 | 10.77 | |
| 008596 | 99.76 | −24.78 | |
| 008597 | 87.43 | | |
| 008598 | 98.73 | | |
| 008599 | 93.92 | −7.14 | |
| 008600 | 92.89 | −13.36 | |
| 008601 | 84.08 | −29.91 | |
| 008602 | 77.11 | −1.29 | |
| 008603 | 98.86 | −33.69 | |
| 008604 | 97.78 | 11.74 | |
| 008605 | 89.40 | 15.55 | |
| 008606 | 97.80 | −24.70 | |
| 008607 | 99.13 | −23.15 | |
| 008608 | 101.58 | 22.19 | |
| 008609 | 102.61 | −20.97 | |
| 008610 | 88.07 | 14.66 | |
| 008611 | 67.93 | 19.97 | |
| 008612 | 96.84 | 39.36 | |
| 008613 | 97.72 | 19.80 | |
| 008614 | 104.96 | 6.65 | |
| 008615 | 53.49 | 52.14 | |
| 008616 | 72.32 | 16.79 | |
| 008617 | 59.08 | 22.33 | |
| 008618 | 21.11 | 86.06 | |
| 008619 | 25.08 | 74.87 | |
| 008620 | 20.59 | 56.54 | |
| 008621 | 40.80 | 56.14 | |
| 008622 | 42.87 | 30.93 | |
| 008623 | 20.12 | 21.58 | |
| 008624 | 36.23 | 62.53 | |
| 008625 | 20.50 | 56.99 | |
| 008626 | 21.85 | 68.58 | |
| 008627 | 74.62 | 2.25 | |
| 008628 | 24.42 | 54.20 | |
| 008629 | 40.53 | 46.28 | |
| 008630 | 45.97 | 36.97 | |
| 008631 | 43.20 | 9.45 | |
| 008632 | 30.06 | 60.57 | |
| 008633 | 39.74 | 38.65 | |
| 008634 | 43.72 | 40.50 | |
| 008635 | 44.20 | 44.95 | |
| 008636 | 46.23 | 19.51 | |
| 008637 | 48.27 | 42.91 | |
| 008638 | 35.60 | 75.46 | |
| 008639 | 41.45 | 50.54 | |
| 008640 | 38.63 | 66.05 | |
| 008641 | 48.44 | 66.16 | |
| 008642 | 22.75 | 88.00 | |
| 008643 | 29.02 | 74.22 | |
| 008644 | 46.00 | 64.65 | |
| 008645 | 59.76 | 51.99 | |
| 008646 | 37.91 | 78.53 | |
| 008647 | 51.76 | 58.99 | |
| 008648 | 30.23 | 70.94 | |
| 008649 | 33.54 | 83.38 | |
| 008650 | 54.27 | 57.50 | |
| 008651 | 100.27 | 27.28 | |
| 008652 | 81.00 | 30.20 | |
| 008653 | 72.23 | 15.07 | |
| 008654 | 66.92 | 9.73 | |
| 008655 | 66.26 | 14.18 | |
| 008656 | 57.45 | 12.46 | |
| 008657 | 74.32 | 17.81 | |
| 008658 | 67.55 | 21.14 | |
| 008659 | 43.67 | 33.40 | |
| 008660 | 50.49 | 35.83 | |
| 008661 | 45.17 | 42.72 | |
| 008662 | 39.03 | 23.82 | |
| 008663 | 43.03 | 40.46 | |
| 008664 | 105.40 | −6.50 | |
| 008665 | 81.88 | 4.16 | |
| 008666 | 92.28 | 6.70 | |
| 008667 | 60.19 | 43.73 | |
| 008668 | 63.66 | 19.92 | |
| 008669 | 94.07 | 8.48 | |
| 008670 | 48.31 | 43.81 | |
| 008671 | 51.68 | 23.34 | |
| 008672 | 72.23 | 16.98 | |
| 008673 | 66.41 | 27.67 | |
| 008674 | 28.09 | 51.95 | |
| 008675 | 7.60 | 59.96 | |
| 008676 | 100.11 | 0.57 | |
| 008677 | 58.31 | 9.26 | |
| 008678 | 49.53 | 6.48 | |
| 008679 | 69.02 | −8.39 | |
| 008680 | 71.05 | 18.78 | |
| 008681 | 70.42 | 23.46 | |
| 008682 | 52.80 | 13.96 | |
| 008683 | 36.48 | 72.06 | |
| 008684 | 30.17 | 78.02 | |
| 008685 | 12.54 | 48.73 | |
| 008686 | 11.09 | 79.37 | |
| 008687 | 20.11 | 76.19 | |
| 008688 | 14.29 | 79.90 | |
| 008689 | 10.53 | 82.79 | |
| 008690 | 10.98 | 84.56 | |
| 008691 | 15.05 | 40.07 | |
| 008692 | 12.93 | 68.76 | |
| 008693 | 22.38 | 66.83 | |
| 008694 | 13.87 | 75.99 | |
| 008695 | 27.81 | 59.48 | |
| 008696 | 22.24 | 62.24 | |
| 008697 | 82.14 | 1.37 | |
| 008698 | 81.57 | −8.67 | |
| 008699 | 100.46 | −11.16 | |
| 008700 | 59.78 | −5.82 | |
| 008701 | 57.00 | 39.68 | |
| 008702 | 56.80 | 5.60 | |
| 008703 | 39.24 | 9.05 | |
| 008704 | 64.80 | −9.23 | |
| 008705 | 76.57 | 15.49 | |
| 008706 | 16.76 | 53.96 | |
| 008707 | 36.03 | 34.26 | |
| 008708 | 10.00 | | |
| 008709 | 11.61 | 80.91 | |
| 008710 | 8.81 | 88.32 | |
| 008711 | 84.04 | 0.03 | |
| 008712 | 76.06 | 17.37 | |
| 008713 | 25.61 | 84.31 | |
| 008714 | 12.88 | | |
| 008715 | 76.98 | −2.75 | |
| 008716 | 94.96 | 11.83 | |
| 008717 | 93.91 | 2.40 | |
| 008718 | 100.17 | −16.30 | |
| 008719 | 91.54 | 13.49 | |
| 008720 | 97.94 | 7.92 | |
| 008721 | 100.28 | 31.06 | |
| 008722 | 101.50 | 21.56 | |
| 008723 | 94.78 | 12.67 | |
| 008724 | 86.03 | 31.68 | |
| 008725 | 93.84 | 28.07 | |
| 008726 | 84.38 | 21.37 | |
| 008727 | 71.50 | 6.72 | |
| 008728 | 34.62 | 34.34 | |
| 008729 | 62.65 | 16.28 | |
| 008730 | 93.91 | −1.01 | |
| 008731 | 94.63 | −3.52 | |
| 008732 | 104.86 | −21.83 | |
| 008733 | 87.33 | −0.89 | |
| 008734 | 90.07 | −6.51 | |
| 008735 | 12.76 | 75.03 | |
| 008736 | 15.68 | 59.26 | |
| 008737 | 22.45 | 43.45 | |
| 008738 | 15.62 | 76.17 | |
| 008739 | 17.72 | 79.88 | |
| 008740 | 36.15 | 51.83 | |
| 008741 | 25.98 | 65.80 | |
| 008742 | 40.95 | 23.08 | |
| 008743 | 47.24 | 30.97 | |
| 008744 | 11.85 | | |
| 008745 | 29.81 | 34.45 | |
| 008746 | 102.09 | 51.23 | |
| 008747 | 13.74 | 67.47 | |
| 008748 | 29.79 | | |
| 008749 | 13.25 | 77.62 | |
| 008750 | 30.33 | 65.46 | |
| 008751 | 14.95 | | |
| 008752 | 27.50 | | |
| 008753 | 27.75 | 29.10 | |
| 008754 | 26.68 | 65.84 | |
| 008755 | 29.58 | 58.42 | |
| 008756 | 63.80 | 24.58 | |
| 008757 | 83.62 | −8.59 | |
| 008758 | 99.02 | −13.63 | |
| 008759 | 102.25 | −4.26 | |
| 008760 | 108.26 | −20.36 | |
| 008761 | 92.73 | −15.24 | |
| 008762 | 10.50 | | |
| 008763 | 20.08 | 80.81 | |
| 008764 | 37.65 | 76.43 | |
| 008765 | 7.18 | 85.46 | |
| 008766 | 10.48 | 77.25 | |
| 008767 | 19.59 | 64.53 | |
| 008768 | 10.37 | 86.37 | |
| 008769 | 18.43 | −42.72 | |
| 008770 | 24.87 | 67.85 | |
| 008771 | 12.63 | 80.76 | |
| 008772 | 11.47 | | |
| 008773 | 61.58 | −2.84 | |
| 008774 | 13.87 | 63.48 | |
| 008775 | 71.43 | −50.77 | |
| 008776 | 47.25 | −15.93 | |
| 008777 | 96.37 | 16.36 | |
| 008778 | 73.74 | 61.94 | |
| 008779 | 68.14 | 41.00 | |
| 008780 | 100.54 | 18.68 | |
| 008781 | 43.90 | 49.68 | |
| 008782 | 61.07 | −7.51 | |
| 008783 | 61.91 | 19.67 | |
| 008784 | 70.96 | −0.06 | |
| 008785 | 51.11 | 11.89 | |
| 008786 | 45.57 | 41.46 | |
| 008787 | 27.87 | | |
| 008788 | 36.19 | 78.55 | |
| 008789 | 37.25 | 58.80 | |
| 008790 | 18.90 | 59.50 | |
| 008791 | 39.68 | 42.57 | |
| 008792 | 35.77 | 53.91 | |
| 008793 | 25.24 | 58.97 | |
| 008794 | 23.12 | 77.38 | |
| 008795 | 44.61 | 11.30 | |
| 008796 | 21.41 | 76.54 | |
| 008797 | 83.94 | −9.77 | |
| 008798 | 50.21 | 50.37 | |
| 008799 | 37.25 | 75.62 | |
| 008800 | 37.42 | −36.80 | |
| 008801 | 20.94 | 56.21 | |
| 008802 | 96.86 | −0.99 | |
| 008803 | 106.01 | | |
| 008804 | 90.76 | 8.55 | |
| 008805 | 97.38 | 3.92 | |
| 008806 | 54.14 | 44.43 | |
| 008807 | 97.46 | 9.01 | |
| 008808 | 102.33 | −8.76 | |
| 008809 | 87.28 | 25.67 | |
| 008810 | 56.16 | 60.39 | |
| 008811 | 82.15 | 27.77 | |
| 008812 | 47.52 | 56.66 | |
| 008813 | 83.92 | 30.12 | |
| 008814 | 94.04 | 17.42 | |
| 008815 | 77.58 | 12.66 | |
| 008816 | 58.92 | 19.47 | |
| 008817 | 45.37 | 21.46 | |
| 008818 | 55.98 | 43.35 | |
| 008819 | 54.03 | 53.98 | |
| 008820 | 64.33 | 58.54 | |
| 008821 | 52.50 | 55.12 | |
| 008822 | 74.80 | 22.86 | |
| 008823 | 95.21 | | |
| 008824 | 36.13 | 63.15 | |
| 008825 | 32.09 | 64.49 | |
| 008826 | 81.11 | 45.29 | |
| 008827 | 76.18 | 36.36 | |
| 008828 | 83.63 | 21.20 | |
| 008829 | 87.88 | 38.64 | |
| 008830 | 82.31 | 47.66 | |
| 008831 | 72.16 | 81.78 | |
| 008832 | 71.96 | 84.78 | |
| 008833 | 98.60 | 32.15 | |
| 008834 | 101.20 | 7.29 | |
| 008835 | 95.58 | 15.90 | |
| 008836 | 27.69 | 78.30 | |
| 008837 | 22.36 | 92.45 | |
| 008838 | 30.05 | 87.30 | |
| 008839 | 59.59 | 38.83 | |
| 008840 | 66.41 | | |
| 008841 | 65.78 | 4.01 | |
| 008842 | 48.10 | 40.87 | |
| 008843 | 56.40 | | |
| 008844 | 48.84 | 21.62 | |
| 008845 | 45.77 | 53.83 | |
| 008846 | 38.79 | 59.81 | |
| 008847 | 61.46 | 33.64 | |
| 008848 | 78.28 | −11.96 | |
| 008849 | 83.14 | 18.21 | |
| 008850 | 35.26 | 22.50 | |
| 008851 | 21.04 | 76.97 | |
| 008852 | 64.79 | 22.08 | |
| 008853 | 52.82 | 28.91 | |
| 008854 | 78.28 | 40.47 | |
| 008855 | 108.07 | 14.72 | |
| 008856 | 96.40 | | |
| 008857 | 64.70 | 46.14 | |
| 008858 | 79.46 | 43.07 | |
| 008859 | 75.71 | | |
| 008860 | 42.15 | 61.77 | |
| 008861 | 51.48 | 69.41 | |
| 008862 | 119.59 | 9.36 | |
| 008863 | 99.49 | 1.99 | |
| 008864 | 57.74 | 36.42 | |
| 008865 | 58.09 | 27.89 | |
| 008866 | 74.09 | 9.96 | |
| 008867 | 56.76 | 25.23 | |
| 008868 | 94.07 | 16.49 | |
| 008869 | 114.08 | −6.54 | |
| 008870 | 66.64 | 43.95 | |
| 008871 | 36.94 | 45.83 | |
| 008872 | 60.83 | 0.98 | |
| 008873 | 99.17 | 11.28 | |
| 008874 | 111.48 | 15.50 | |
| 008875 | 104.32 | 19.90 | |
| 008876 | 105.53 | 25.85 | |
| 008877 | 88.62 | 8.29 | |
| 008878 | 95.77 | 9.11 | |
| 008879 | 89.72 | 7.56 | |
| 008880 | 44.12 | 29.47 | |
| 008881 | 65.38 | −70.54 | |
| 008882 | 79.98 | 46.28 | |
| 008883 | 61.35 | 36.83 | |
| 008884 | 62.50 | 25.09 | |
| 008885 | 58.54 | 20.30 | |
| 008886 | 95.93 | 51.85 | |
| 008887 | 40.76 | 31.60 | |
| 008888 | 44.84 | 9.24 | |
| 008889 | 69.14 | 39.04 | |
| 008890 | 80.68 | | |
| 008891 | 96.58 | 27.91 | |
| 008892 | 80.78 | 7.95 | |
| 008893 | 51.17 | 24.19 | |
| 008894 | 44.82 | 27.33 | |
| 008895 | 114.09 | | |
| 008896 | 134.80 | | |
| 008897 | 99.70 | 17.68 | |
| 008898 | 89.07 | 16.71 | |
| 008899 | 38.29 | 44.32 | |
| 008900 | 55.27 | −3.26 | |
| 008901 | 100.02 | 17.95 | |
| 008902 | 73.53 | 18.18 | |
| 008903 | 104.88 | −0.27 | |
| 008904 | 27.88 | 56.68 | |
| 008905 | 26.15 | 51.25 | |
| 008906 | 29.06 | 52.77 | |
| 008907 | 23.23 | 60.57 | |
| 008908 | 16.53 | 78.72 | |
| 008909 | 16.13 | 88.43 | |
| 008910 | 34.17 | 52.80 | |
| 008911 | 76.84 | −6.26 | |
| 008912 | 83.79 | −4.78 | |
| 008913 | 102.22 | 7.25 | |
| 008914 | 99.50 | −3.97 | |
| 008915 | 104.15 | 0.84 | |
| 008916 | 96.05 | 10.83 | |
| 008917 | 76.54 | 12.60 | |
| 008918 | 83.94 | 2.69 | |
| 008919 | 101.02 | −19.99 | |
| 008920 | 91.71 | −0.01 | |
| 008921 | 72.06 | −6.88 | |
| 008922 | 76.87 | 22.49 | |
| 008923 | 103.01 | −13.97 | |
| 008924 | 70.79 | 6.49 | |
| 008925 | 55.25 | 48.18 | |
| 008926 | 56.49 | 19.86 | |
| 008927 | 35.19 | 50.78 | |
| 008928 | 35.19 | 36.86 | |
| 008929 | 48.70 | 46.97 | |
| 008930 | 29.86 | 88.58 | |
| 008931 | 47.83 | 63.73 | |
| 008932 | 51.51 | 69.14 | |
| 008933 | 70.03 | 38.53 | |
| 008934 | 58.98 | 63.66 | |
| 008935 | 61.55 | 35.30 | |
| 008936 | 58.07 | 30.95 | |
| 008937 | 46.88 | 46.47 | |
| 008938 | 54.92 | 61.08 | |
| 008939 | 123.45 | −5.94 | |
| 008940 | 116.82 | −47.46 | |
| 008941 | 28.62 | 30.27 | |
| 008942 | 65.62 | −16.74 | |
| 008943 | 39.33 | 31.95 | |
| 008944 | 63.48 | 30.41 | |
| 008945 | 67.14 | 16.25 | |
| 008946 | 49.01 | −34.12 | |
| 008947 | 49.79 | 61.47 | |
| 008948 | 41.01 | 71.95 | |
| 008949 | 48.76 | 45.13 | |
| 008950 | 44.72 | 18.21 | |
| 008951 | 47.66 | −11.32 | |
| 008952 | 59.87 | −7.73 | |
| 008953 | 78.68 | 12.14 | |
| 008954 | 69.52 | 18.01 | |
| 008955 | 86.22 | −6.78 | |
| 008956 | 103.89 | −9.37 | |
| 008957 | 100.69 | 10.97 | |
| 008958 | 105.40 | 26.92 | |
| 008959 | 104.13 | −8.60 | |
| 008960 | 77.53 | 7.28 | |
| 008961 | 43.55 | 28.47 | |
| 008962 | 22.43 | 55.20 | |
| 008963 | 32.26 | 53.94 | |
| 008964 | 54.49 | 36.16 | |
| 008965 | 61.14 | −2.80 | |
| 008966 | 30.18 | 70.44 | |
| 008967 | 23.66 | 71.89 | |
| 008968 | 34.22 | 63.68 | |
| 008969 | 28.27 | 67.70 | |
| 008970 | 30.27 | 73.92 | |
| 008971 | 31.82 | 35.74 | |
| 008972 | 41.65 | 58.44 | |
| 008973 | 39.29 | 57.97 | |
| 008974 | 33.31 | 60.39 | |
| 008975 | 42.66 | 66.78 | |
| 008976 | 53.86 | 65.19 | |
| 008977 | 112.73 | −11.73 | |
| 008978 | 112.79 | −16.95 | |
| 008979 | 107.98 | −17.22 | |
| 008980 | 107.97 | −21.91 | |
| 008981 | 101.56 | −3.76 | |
| 008982 | 94.98 | −7.28 | |
| 008983 | 101.95 | −42.77 | |
| 008984 | 117.87 | −10.50 | |
| 008985 | 50.93 | 21.86 | |
| 008986 | 69.30 | | |
| 008987 | 40.92 | 51.72 | |
| 008988 | 86.03 | 11.94 | |
| 008989 | 98.73 | | |
| 008990 | 93.40 | −26.23 | |
| 008991 | 114.15 | −29.70 | |
| 008992 | 112.79 | −29.20 | |
| 008993 | 83.04 | 10.48 | |
| 008994 | 51.80 | 40.10 | |
| 008995 | 88.85 | −0.20 | |
| 008996 | 63.75 | 9.43 | |
| 008997 | 27.60 | 45.22 | |
| 008998 | 41.05 | 15.40 | |
| 008999 | 64.39 | 15.78 | |
| 009000 | 32.63 | 32.17 | |
| 009001 | 36.47 | 44.02 | |
| 009002 | 73.22 | 25.36 | |
| 009003 | 87.01 | 12.32 | |
| 009004 | 91.06 | 15.83 | |
| 009005 | 72.69 | 9.83 | |
| 009006 | 70.86 | 37.49 | |
| 009007 | 60.31 | 33.13 | |
| 009008 | 92.31 | 3.32 | |
| 009009 | 80.63 | 24.95 | |
| 009010 | 86.33 | 6.03 | |
| 009011 | 86.70 | 33.64 | |
| 009012 | 82.69 | 1.71 | |
| 009013 | 31.56 | 45.26 | |
| 009014 | 101.02 | 12.09 | |
| 009015 | 93.66 | 7.25 | |
| 009016 | 99.43 | 31.26 | |
| 009017 | 70.91 | −0.98 | |
| 009018 | 41.24 | 53.60 | |
| 009019 | 34.57 | 55.30 | |
| 009020 | 52.43 | 61.69 | |
| 009021 | 59.98 | 51.39 | |
| 009022 | 74.14 | 33.58 | |
| 009023 | 72.14 | −0.71 | |
| 009024 | 72.66 | 4.00 | |
| 009025 | 77.57 | −6.84 | |
| 009026 | 94.95 | 17.73 | |
| 009027 | 36.59 | 69.55 | |
| 009028 | 22.91 | 60.53 | |
| 009029 | 32.75 | 75.07 | |
| 009030 | 99.82 | 2.17 | |
| 009031 | 46.18 | 46.27 | |
| 009032 | 72.06 | 22.16 | |
| 009033 | 32.71 | 59.98 | |
| 009034 | 32.30 | 65.60 | |
| 009035 | 29.11 | 49.79 | |
| 009036 | 43.80 | 59.17 | |
| 009037 | 62.94 | 27.78 | |
| 009038 | 41.07 | 78.41 | |
| 009039 | 41.74 | 59.76 | |
| 009040 | 79.46 | 22.12 | |
| 009041 | 73.58 | 39.76 | |
| 009042 | 74.10 | 48.08 | |
| 009043 | 90.10 | 15.32 | |
| 009044 | 79.40 | 27.06 | |
| 009045 | 70.14 | 32.33 | |
| 009046 | 61.17 | 26.16 | |

[0457] Table 2 shows the potency of the various ASOs in reducing SNCA protein expression in primary neurons isolated from A53T-PAC transgenic mice in vitro. The PAC neurons were cultured in vitro with the 10-point titration (indicates above) of the different ASOs and the potency (IC₅₀) of the ASOs is shown as a ratio of SNCA to tubulin expression (μM).

| | LE PAC ASyn/Tub |
|---|---|
| ASO_NO | IC50 (uM) |
| ASO-000838 | 0.03 |
| ASO-001233 | 1.52 |
| ASO-001268 | 0.04 |
| ASO-001281 | 0.19 |
| ASO-001282 | 0.07 |
| ASO-001308 | 0.02 |
| ASO-001310 | 0.21 |
| ASO-001328 | 0.003 |
| ASO-001334 | 0.16 |
| ASO-001344 | 0.03 |
| ASO-001357 | 0.03 |
| ASO-001363 | 0.03 |
| ASO-001365 | 0.01 |
| ASO-001367 | 0.22 |
| ASO-001384 | 0.10 |
| ASO-001395 | 0.03 |
| ASO-001398 | 0.02 |
| ASO-001434 | 0.15 |
| ASO-001453 | 0.46 |
| ASO-001459 | 0.28 |
| ASO-001463 | 0.11 |
| ASO-001467 | 0.30 |
| ASO-001468 | 0.12 |
| ASO-001471 | 0.03 |
| ASO-001481 | 0.05 |
| ASO-001484 | 0.25 |
| ASO-001486 | 0.06 |
| ASO-001532 | 0.06 |
| ASO-001537 | 0.02 |
| ASO-001549 | 0.01 |
| ASO-001554 | 0.15 |
| ASO-001560 | 0.06 |
| ASO-001561 | 0.01 |
| ASO-001582 | 0.07 |
| ASO-001585 | 0.03 |
| ASO-001605 | 0.01 |
| ASO-001606 | 0.01 |
| ASO-001638 | 0.05 |
| ASO-001639 | 0.10 |
| ASO-001665 | 0.02 |
| ASO-001669 | 0.10 |
| ASO-001671 | 0.01 |
| ASO-001673 | 0.08 |
| ASO-001677 | 0.52 |
| ASO-001694 | 0.24 |
| ASO-001702 | 0.18 |
| ASO-001730 | 0.22 |
| ASO-001755 | 0.32 |
| ASO-001757 | 0.29 |
| ASO-001774 | 0.19 |
| ASO-002041 | 0.04 |
| ASO-002497 | 10.08 |
| ASO-002498 | 6.00 |
| ASO-002501 | 6.00 |
| ASO-002502 | 0.04 |
| ASO-002505 | 17.45 |
| ASO-002506 | 2,165.47 |
| ASO-002509 | 10,000.00 |
| ASO-002510 | 560.94 |
| ASO-002512 | 1.47 |
| ASO-002513 | 55.07 |
| ASO-002515 | 19.89 |
| ASO-002516 | 1.01 |
| ASO-002518 | 2.71 |
| ASO-002519 | 10.56 |
| ASO-002521 | 1.95 |
| ASO-002522 | 0.002 |
| ASO-002686 | 0.03 |
| ASO-002690 | 0.03 |
| ASO-002692 | 0.11 |
| ASO-002693 | 0.01 |
| ASO-002694 | 0.01 |
| ASO-002705 | 0.06 |
| ASO-002730 | 0.06 |
| ASO-002738 | 0.05 |
| ASO-002739 | 0.09 |
| ASO-002761 | 0.05 |
| ASO-002762 | 0.01 |
| ASO-002763 | 0.05 |
| ASO-002765 | 0.04 |
| ASO-002779 | 0.04 |
| ASO-002785 | 0.01 |
| ASO-002798 | 0.02 |
| ASO-002801 | 0.01 |
| ASO-002804 | 0.03 |
| ASO-002805 | 0.01 |
| ASO-002817 | 0.03 |
| ASO-002820 | 0.04 |
| ASO-002825 | 0.02 |
| ASO-002828 | 0.02 |
| ASO-002832 | 0.01 |
| ASO-002833 | 0.01 |
| ASO-002836 | 0.04 |
| ASO-002837 | 0.02 |
| ASO-002838 | 0.01 |
| ASO-002842 | 0.13 |
| ASO-002843 | 0.01 |
| ASO-002844 | 0.01 |
| ASO-002847 | 0.01 |
| ASO-002848 | 0.01 |
| ASO-002849 | 0.01 |
| ASO-002850 | 0.005 |
| ASO-002852 | 0.01 |
| ASO-002858 | 0.01 |
| ASO-002860 | 0.01 |
| ASO-002863 | 0.01 |
| ASO-002864 | 0.01 |
| ASO-002867 | 0.02 |
| ASO-002901 | 0.02 |
| ASO-002908 | 0.08 |
| ASO-002935 | 0.02 |
| ASO-002968 | 0.01 |
| ASO-002983 | 0.04 |
| ASO-002990 | 0.04 |
| ASO-002992 | 0.35 |
| ASO-002994 | 0.04 |
| ASO-002995 | 0.11 |
| ASO-003058 | 0.02 |
| ASO-003061 | 0.03 |
| ASO-003063 | 0.05 |
| ASO-003069 | 0.03 |
| ASO-003072 | 0.09 |
| ASO-003092 | 0.04 |
| ASO-003172 | 0.01 |
| ASO-003173 | 0.01 |
| ASO-003175 | 0.01 |
| ASO-003176 | 0.02 |
| ASO-003177 | 0.02 |
| ASO-003179 | 0.02 |
| ASO-003181 | 0.01 |
| ASO-003199 | 0.01 |
| ASO-003202 | 0.02 |
| ASO-003203 | 0.05 |
| ASO-003206 | 0.02 |
| ASO-003229 | 0.03 |
| ASO-003279 | 0.01 |
| ASO-003323 | 0.01 |
| ASO-003330 | 0.01 |
| ASO-003345 | 0.02 |
| ASO-003349 | 0.01 |
| ASO-004871 | 0.05 |
| ASO-004881 | 0.02 |
| ASO-004885 | 0.16 |
| ASO-004901 | 0.13 |
| ASO-004902 | 0.03 |
| ASO-004903 | 0.02 |
| ASO-004910 | 0.02 |
| ASO-004913 | 0.07 |
| ASO-004917 | 0.03 |
| ASO-004932 | 0.06 |
| ASO-004934 | 0.08 |
| ASO-004936 | 0.11 |
| ASO-005273 | 0.05 |
| ASO-005276 | 0.04 |
| ASO-005281 | 0.09 |
| ASO-005289 | 0.11 |
| ASO-005292 | 0.02 |
| ASO-005304 | 0.05 |
| ASO-005305 | 0.02 |
| ASO-005308 | 0.05 |
| ASO-005309 | 0.02 |
| ASO-005317 | 0.03 |
| ASO-005319 | 0.07 |
| ASO-005330 | 0.02 |
| ASO-005336 | 0.08 |
| ASO-005348 | 0.02 |
| ASO-006712 | 0.01 |
| ASO-008226 | 0.01 |
| ASO-008261 | 0.01 |
| ASO-008387 | 0.01 |
| ASO-008388 | 0.01 |
| ASO-008501 | 0.004 |
| ASO-008502 | 0.01 |
| ASO-008529 | 0.004 |
| ASO-008530 | 0.01 |
| ASO-008531 | 0.01 |
| ASO-008532 | 0.004 |
| ASO-008533 | 0.01 |
| ASO-008534 | 0.01 |
| ASO-008535 | 0.01 |
| ASO-008536 | 0.003 |
| ASO-008537 | 0.01 |
| ASO-008543 | 0.01 |
| ASO-008545 | 0.01 |
| ASO-008584 | 0.003 |
| ASO-286762 | 0.03 |
| ASO-286785 | 0.12 |
| ASO-287033 | 0.03 |
| ASO-287041 | 0.57 |
| ASO-287053 | 4.00 |
| ASO-287965 | 0.06 |
| ASO-288902 | 0.11 |
| ASO-288903 | 0.27 |
| ASO-288905 | 0.04 |
| ASO-290315 | 0.02 |
| ASO-292378 | 0.07 |

[0458] Table 3 shows the effect of additional exemplary ASOs from FIGS. 1A to 1C on SNCA protein expression in PAC neurons when cultured in vitro with 5 μM of the ASO. The SNCA protein expression was normalized to tubulin expression and is shown as a percent of the control.

| | “PAC | | “PAC | | “PAC |
|---|---|---|---|---|---|
| | neurons | | neurons | | neurons |
| | aysn/tub | | aysn/tub | | aysn/tub |
| | % | | % | | % |
| | Ctrl@5 | | Ctrl@5 | | Ctrl@5 |
| ASO_NO | uM” | ASO_NO | uM” | ASO_NO | uM” |
| ASO-000875 | 17.41 | ASO-000885 | 43.42 | ASO-000862 | 117.31 |
| ASO-000873 | 29.15 | ASO-000882 | 20.58 | ASO-000840 | 8.82 |
| ASO-000872 | 26.91 | ASO-000880 | 88.38 | ASO-000847 | 12.14 |
| ASO-000874 | 4.94 | ASO-000884 | 105.54 | ASO-000850 | 15.52 |
| ASO-000878 | 11.16 | ASO-000883 | 55.93 | ASO-000842 | 15.68 |
| ASO-000879 | 5.54 | ASO-000837 | 43.76 | ASO-000865 | 18.84 |
| ASO-000835 | 12.81 | ASO-000836 | 19.21 | ASO-000866 | 20.29 |
| ASO-000876 | 36.99 | ASO-000839 | 37.85 | ASO-000843 | 20.39 |
| ASO-000877 | 7.82 | ASO-000855 | 48.04 | ASO-000853 | 21.49 |
| ASO-000867 | 170.64 | ASO-000856 | 103.49 | ASO-000852 | 25.01 |
| ASO-000869 | 71.40 | ASO-000857 | 118.02 | ASO-000851 | 27.66 |
| ASO-000864 | 146.16 | ASO-000858 | 141.21 | ASO-000845 | 30.91 |
| ASO-000863 | 205.30 | ASO-000859 | 60.26 | ASO-000846 | 32.06 |
| ASO-000870 | 71.03 | ASO-000860 | 62.01 | ASO-000841 | 37.83 |
| ASO-000881 | 6.19 | ASO-000861 | 111.60 | ASO-000844 | 58.08 |

### Example 2B: Spontaneous Calcium Oscillation Measurement

[0459] Reduced oscillations in intracellular free calcium concentration (calcium oscillation) corresponds to increased neurotoxicity and therefore, can indicate reduced tolerability in vivo. To measure primary cortical neuron spontaneous calcium oscillation, rat primary cortical neurons were prepared from Sprague-Dawley rat embryos (E19). Briefly, the brain cortex was dissected and incubated at 37° C. for 30-45 minutes in papain/DNase/Earle's balanced salt solution (EBSS) solution. After trituration and centrifugation of the cell pellet, the reaction was stopped by incubation with EBSS containing protease inhibitors, bovine serum albumin (BSA), and DNase. The cells were then triturated and washed with Neurobasal (NB, Invitrogen) supplemented with 2% B-27, 100 μg/ml penicillin, 85 μg/ml streptomycin, and 0.5 mM glutamine.

[0460] The cells were plated at a concentration of 25,000 cells/well onto 384-well poly-D-lysine coated fluorescent imaging plates (BD Biosciences) in 25 μl/well supplemented Neurobasal (NB) media (containing B27 supplement and 2 mM glutamine). The cells were grown for 12 days at 37° C. in 5% CO₂ and fed with 25 μl of additional media on DIV04 (i.e., 4 days after plating) and DIV08 (i.e., 8 days after plating) for use on DIV12 (i.e., 12 days after plating).

[0461] On the day of the experiment, the NB media was removed from the plate and the cells were washed once with 50 μl/well of 37° C. assay buffer (Hank's Balanced Salt Solution, containing 2 mM CaCl₂ and 10 mM Hopes pH 7.4). Oscillations were tested both in the presence and in the absence of 1 mM MgCl₂. The cells were loaded with a cell permanent fluorescent calcium dye, Fluo-4-AM (Invitrogen, Molecular Probes F14201). Fluo-4-AM was prepared at 2.5 mM in DMSO containing 10% pluronic F-127 and then diluted 1:1000 in the assay buffer for a final concentration of 2.5 μM. The cells were incubated for 1 hr with 20 μl of 2.5 μM Fluo-4-AM at 37° C. in 5% CO₂. After the incubation, an additional 20 μl of room temperature assay buffer was added, and the cells were allowed to equilibrate to room temperature in the dark for 10 minutes.

[0462] The plates were read on a FDSS 7000 fluorescent plate reader (Hamamatsu) at an excitation wavelength of 485 nm and emission wavelength of 525 nm. The total fluorescence recording time was 600 seconds at 1 Hz acquisition rate for all 384 wells. An initial baseline signal (measurement of intracellular calcium) was established for 99 seconds before the addition of the ASOs. ASOs were added with a 384 well head in the FLIPR in 20 μl of assay buffer at 75 μM for a final concentration of 25 μM. In some instances an ASO targeting tau such as ASO—000013 (OxyAs OxyTs OxyTs DNAts DNAcs DNAcs DNAas DNAas DNAas DNAts DNAts DNAcs DNAas OxyMCs OxyTs OxyT; ATTtccaaattcaCTT, SEQ ID NO: 1880) or ASO—000010 (TCTgtcttggctTTG, SEQ ID NO: 1879) was included as controls.

[0463] Fluorescence time sequence intensity measurements (described above) were exported from the Hamamatsu reader, and transferred to an in-house proprietary application in IDBS E-Workbook suite for data reduction and normalization. In each 384 well screening plate, up to a maximum of 48 individual ASOs were tested in quadruplicate wells. 12 wells were exposed to a positive control (ASO—000010), which significantly inhibits the calcium oscillations counted during the 300 sec acquisition time frame and 12 wells were exposed to an negative control inactive ASO (ASO—000013) which does not inhibit the observation of calcium oscillations. Finally, 24 wells were dedicated to a vehicle control consisting of RNase-DNase-free water at the same concentration used to dilute the test ASOs. The effects of test ASOs in individual wells on calcium oscillation frequency (over the 300 sec period) were expressed as a % control of the median number of calcium oscillations counted in the 24 vehicle control wells. Individual 384 well assay plates passed QC standards if the positive and negative ASO controls (ASO—000010 and ASO—000013) exhibited well characterized pharmacology in the Ca assay, and if the vehicle and pharmacological control wells generated a minimum of ˜20 calcium oscillations over the 300 sec experimental time period.

### Example 2C: QUANTIGENE® Analysis (96-Well Assay) to Measure mRNA Reduction in Human Neurons

[0464] The ability of ASOs to reduce human SNCA mRNA and/or possible human off target mRNA species was measured in vitro by QUANTIGENE® analysis. Human neurons (Cellular Dynamics Inc., “iNeurons”), were thawed, plated, and cultured per manufacturer's specifications. These iNeurons are highly pure population of human neurons derived from induced pluripotent stem (iPS) cells using Cellular Dynamic's proprietary differentiation and purification protocols.

[0465] Lysis: Cells were plated on poly-L-ornithine/laminin coated 96-well plates at 50,000 to 100,000 cells per well (dependent on the expression of the off target being investigated) and maintained in Neurobasal media supplemented with B27, glutamax, and Penicillin-Streptomycin. The ASOs were diluted in water and added to cells at DIV01 (i.e., 1 day post plating). For single point measurements, a final ASO concentration of 0.5 μM was typically used. For IC₅₀ determinations, the neurons were treated with a seven-point concentration response dilution of 1:4, with the highest concentration as 5 μM to define the IC₅₀. The cells were then incubated at 37° C. and 5% CO₂ for 6 days to achieve steady state reduction of mRNA.

[0466] After the incubation, the media was removed and cells were washed 1× in DPBS and lysed as follows. Measurement of lysate messenger RNA was performed using the QUANTIGENE® 2.0 Reagent System (AFFYMETRIX®), which quantitates RNA using a branched DNA-signal amplification method reliant on the specifically designed RNA capture probe set. The working cell lysis buffer solution was made by adding 50 μl proteinase K to 5 ml of pre-warmed (37° C.) Lysis mix and diluted in dH₂O to a 1:4 final dilution. The working lysis buffer was added to the plates (100 to 150 μl/well, depending on the expression of the off target being investigated), triturated 10 times, sealed and incubated for 30 min at 55° C. Following the lysis, the wells were triturated 10 more times, and the plates were stored at −80° C. or assayed immediately.

[0467] Assay: Depending on the specific capture probe used (i.e., SNCA, PROS1, or tubulin), the lysates were diluted (or not diluted) in the lysis mix. Then, the lysates were added to the capture plates (96-well polystyrene plate coated with capture probes) at a total volume of 80 μl/well. Working probe sets reagents were generated by combining nuclease-free water (12.1 μl), lysis mixture (6.6 μl), blocking reagent (1 μl), and specific 2.0 probe set (0.3 μl) (human SNCA catalogue #SA-50528, human PROS1 catalogue #SA-10542, or human beta 3 tubulin catalogue #SA-15628) per manufacturer's instructions (QUANTIGENE® 2.0 AFFYMETRIX®). Next, 20 μl working probe set reagents were added to 80 μl lysate dilution (or 80 μl lysis mix for background samples) on the capture plate. Plates were centrifuged at 240 g for 20 seconds and then incubated for 16-20 hours at 55° C. to hybridize (target RNA capture).

[0468] Signal amplification and detection of target RNA began by washing plates with buffer 3 times (300 μl/well) to remove any unbound material. Next, the 2.0 Pre-Amplifier hybridization reagent (100 μl/well) was added, incubated at 55° C. for 1 hour, then aspirated, and wash buffer was added and aspirated 3 times. The 2.0 Amplifier hybridization reagent was then added as described (100 μl/well), incubated for 1 hour at 55° C. and the wash step repeated as described previously. The 2.0 Label Probe hybridization reagent was added next (100 μl/well), incubated for 1 hour at 50° C. and the wash step was repeated as described previously. The plates were again centrifuged at 240 g for 20 seconds to remove any excess wash buffer and then, the 2.0 Substrate was added (100 μl/well) to the plates. Plates were incubated for 5 minutes at room temperature and then, the plates were imaged on a PerkinElmer Envision multilabel reader in luminometer mode within 15 minutes.

[0469] Data determination: For the gene of interest, the average assay background signal was subtracted from the average signal of each technical replicate. The background-subtracted, average signals for the gene of interest were then normalized to the background-subtracted average signal for the housekeeping tubulin RNA. The percent inhibition for the treated sample was calculated relative to the control treated sample lysate.

### Example 2D: QUANTIGENE® Analysis (96-Well Assay) to Measure mRNA Reduction in Ramos Cells

[0470] To measure possible human off target IKZF3 (IKAROS family zinc finger 3) mRNA reduction, Ramos cells (a human lymphocytic cell line) were used. Since Ramos cells do not express SNCA, RB1 (RB transcriptional corepressor 1), which is expressed in Ramos cells, was used as a positive control for assessing ASO-mediated knockdown IKZF3 mRNA expression. Two ASOs were synthesized to bind to and knockdown human RB1 mRNA expression. Beta-2 microglobulin (β2M) was used as a housekeeping gene control. The Ramos cells were grown in suspension in RPMI media supplemented with FBS, glutamine, and Pen/Strep.

[0471] Lysis: Cells were plated on poly-L-ornithine/laminin coated 96 well plates at 20,000 cells per well and maintained in Neurobasal media containing B27, glutamax and Penicillin-Streptomycin. ASOs were diluted in water and added to cells at 1 day post plating (DIV01) to a final concentration of 1 μM. Following ASO treatment, the cells were incubated at 37° C. for 4 days to achieve steady state reduction of mRNA. After the incubation, the media was removed and cells lysed as follows. Measurement of lysate messenger RNA was performed using the QUANTIGENE® 2.0 Reagent System (AFFYMETRIX®), which quantitated RNA using a branched DNA-signal amplification method reliant on the specifically designed RNA capture probe set. Lysis mix (QuantiGene 2.0 Affymetrix) was pre-warmed in an incubator at 37° C. for 30 minutes. For lysing cells in suspension, 100 μl of 3× Lysis Buffer (with 10 μl/ml proteinase K) was added to 200 μl of cells in suspension. The cells were then triturated 10 times to lyse, and the plate sealed and incubated for 30 min at 55° C. Afterwards, the lysates were stored at −80° C. or assayed immediately.

[0472] Assay: Depending on the specific capture probe used (i.e., IKZF3, RB1, and β2M), the lysates were diluted (or not diluted) in the lysis mix. Then, the lysates were added to the capture plate (96 well polystyrene plate coated with capture probes) at a total volume of 80 μl/well. Working probe sets reagents were generated by combining nuclease-free water 12.1 μl, lysis mixture 6.6 μl, blocking reagent 1 μl, specific 2.0 probe set 0.3 μl (human IKZF3 catalogue #SA-17027, human RB1 catalogue #SA-10550, or human beta-2 microglobulin catalogue #SA-10012) per manufacturer instructions (QUANTIGENE® 2.0 AFFYMETRIX®). Then 20 μl working probe set reagents were added to 80 μl lysate dilution (or 80 μl lysis mix for background samples) on the capture plate. Plates were then incubated for 16-20 hours at 55° C. to hybridize (target RNA capture). Signal amplification and detection of target RNA was begun by washing plates with buffer 3 times (300 μl/well) to remove any unbound material. Next, the 2.0 Pre-Amplifier hybridization reagent (100 μl/well) was added, incubated at 55° C. for 1 hour then aspirated and wash buffer was added and aspirated 3 times. The 2.0 Amplifier hybridization reagent was then added as described (100 μl/well), incubated for 1 hour at 55° C. and the wash step was repeated as described previously. The 2.0 Label Probe hybridization reagent was added next (100 μl/well), incubated for 1 hour at 50° C. and the wash step again was repeated as described previously. The plates were again centrifuged at 240 g for 20 seconds to remove any excess wash buffer and then, the 2.0 Substrate was added (100 μl/well) to the plates. Plates were incubated for 5 minutes at room temperature, and then, the plates were imaged on a PerkinElmer Envision multilabel reader in luminometer mode within 15 minutes.

[0473] Data determination: For the gene of interest, the average assay background signal (i.e., no lysate, just 1× lysis buffer) was subtracted from the average signal of each technical replicate. The background-subtracted, average signals for the gene of interest were then normalized to the background-subtracted average signal for the housekeeping mRNA (for Ramos cells, it was beta-2-microglobulin). The percent inhibition for the treated sample was calculated relative to the average of the untreated sample lysate.

### Example 2E: qPCR Assay to Measure Reduction of SNCA mRNA in SK-N-BE(2) Cells

[0474] ASOs targeting SNCA were tested for its ability to reduce SNCA mRNA expression in human SK-N-BE(2) neuroblastoma cell acquired from ATCC (CRL-2271).

[0475] SK-N-BE(2) cells were grown in cell culturing media (MEM [Sigma, cat.no M2279] supplemented with 10% Fetal Bovine Serum [Sigma, cat.no F7524], 1× Glutamax™ [Sigma, cat.no 3050-038] 1×MEM Non-essential amino acid solution [Sigma, cat.no M7145] and 0.025 mg/ml Gentamycin [Sigma, cat.no G1397]). Cells were trypsinized every 5 days, by washing with Phosphate Buffered Saline (PBS), [Sigma cat.no 14190-094] followed by addition of 0.25% Trypsin-EDTA solution (Sigma, T3924), 2-3 minutes incubation at 37° C., and trituration before cell seeding. Cells were maintained in culture for up to 15 passages.

[0476] For experimental use, 12,500 cells per well were seeded in 96 well plates (Nunc cat.no 167008) in 100 μL growth media. Oligonucleotides were prepared from a 750 μM stock. ASO dissolved in PBS was added approximately 24 hours after the cells were seeded to a final concentration of 25 μM for single point studies. Cells were incubated for 4 days without any media change. For potency determination, 8 concentrations of ASO were prepared for a final concentration range of 16-50,000 nM. ASO—004316 (CcAAAtcttataataACtAC, SEQ ID NO: 1881) and ASO—002816 (TTCctttacaccACAC, SEQ ID NO: 1882) were included as controls.

[0477] After incubation, cells were harvested by removal of media followed by addition of 125 μL PureLink©Pro 96 Lysis buffer (Invitrogen 12173.001A) and 125 μL 70% ethanol. RNA was purified according to the manufacture's instruction and eluted in a final volume of 50 μL water resulting in an RNA concentration of 10-20 ng/μl. RNA was diluted 10 fold in water prior to the one-step qPCR reaction. For one-step qPCR reaction qPCR-mix (qScript TMXLE 1-step RT-qPCR TOUGHMIX®Low ROX from QauntaBio, cat.no 95134-500) was mixed with two Taqman probes in a ratio 10:1:1 (qPCR mix: probe1:probe2) to generate the mastermix. Taqman probes were acquired from LifeTechnologies: SNCA: Hs01103383_m1; PROS1: Hs00165590_m1: TBP: 4325803; GAPDH 4325792. Mastermix (6 μL) and RNA (4 μL, 1-2 ng/μL) were then mixed in a qPCR plate (MICROAMP®optical 384 well, 4309849). After sealing, the plate was given a quick spin, 1000 g for 1 minute at RT, and transferred to a Viia™ 7 system (Applied Biosystems, Thermo), and the following PCR conditions used: 50° C. for 15 minutes; 95° C. for 3 minutes; 40 cycles of: 95° C. for 5 sec followed by a temperature decrease of 1.6° C./sec followed by 60° C. for 45 sec. The data was analyzed using the QuantStudio™ Real_time PCR Software.

[0478] The results are shown in Table 1 under Example 2A.

### Example 3: In Vitro Analysis of ASO—003092 and ASO—003179 on the Reduction of Human SNCA mRNA

[0479] ASO—:1436003092 (20-base SEQ ID NO) and ASO—003179 (19-base SEQ ID NO:1547) are LNA-modified ASOs that target the exon6 region of human SNCA pre-mRNA (SEQ ID NO:1).

### Potency of ASO—003092 and ASO—003179 in Mouse Neurons

[0480] Using the methods described above in Example 2A, ASO—003092 and ASO—003179 were tested for their ability to reduce SNCA protein expression as a downstream result of reduction in SNCA mRNA. Briefly, primary neurons derived from PAC-A53T mice were treated with ASO—003092, ASO—003179, or control ASOs for 14 days. Cells were then fixed and the levels of SNCA protein and tubulin protein were measured by high content imaging. Tubulin levels were measured to monitor toxicity and to normalize SNCA protein reduction.

[0481] As shown in Table 4 below and Table 1 in Example 2A, incubation of cells with 40 nM of ASO—003092 or ASO—003179 resulted in 76% and 73% reduction in SNCA protein expression, respectively. In contrast, both ASOs had minimal to no effect on the level of tubulin protein expression.

TABLE 4
ASO-003092 and ASO-003179 activity in A53T-PAC neurons

| | ASO con- | aSyn/tub | | | Tub | | |
|---|---|---|---|---|---|---|---|
| ASO | centration | % inh | SD | N | % inh | SD | N |
| ASO-003092 | 40 nM | 75.64 | 13.81 | 3 | −11.29 | 18.70 | 4 |
| ASO-003179 | 40 nM | 73.05 | 9.54 | 4 | −9.51 | 19.17 | 4 |

SD = standard deviation
N = number of tests

[0482] The above results demonstrate that ASO—003092 and ASO—003179 effectively reduce SNCA mRNA, which in turn mediates the reduction of SNCA protein levels. These ASOs were well tolerated both in mouse and in human neurons. These findings support the continued development of SNCA-specific ASOs (e.g., ASO—003092 and ASO—003179) as a disease-modifying therapeutic for the treatment of synucleinopathies.

### Example 4: In Vivo Tolerability and In Vivo SNCA mRNA Reduction

[0483] The in vivo tolerability of selected ASOs was tested to see how the ASOs were tolerated when injected into different animal models (i.e., mice and cynomolgous monkeys):

### Mice

[0484] Subjects: Male and female (2-3 months old) PAC-Tg(SNCA^{A53T})^{+/+};SNCA^{-/-} (“PAC-A53T”) mice carrying the entire human SNCA gene with a A53T mutation on a mouse SNCA knockout background were used for acute, long term, and PK/PD in vivo efficacy studies. In some cases wild-type (WT) C57Bl/6 mice were used for long term (i.e., 4 weeks) health assessment. Mice were housed in groups of 4 or 5 in a temperature controlled housing room with food and water available ad libitum. All procedures involving mice were conducted according to Animal Test Methods (ATM) approved by the Bristol-Myers Squibb Animal Care and Use Committee (ACUC).

[0485] ASO Dosing Solution Preparation: Sterile saline (1 mL) syringes fitted with 0.2 μm Whatman filters and nuclease free centrifuge tubes were used to prepare dosing solutions. Indicated volume of water or saline was added to an ASO powder and was vortexed (˜1 min) to dissolve the ASO powder. The solution was then allowed to sit for 10 min and was vortexed again for ˜1 min. The tubes were briefly centrifuged to return all of the liquid to the bottom of the tube, and then, the solution was filtered through a 0.2 μm sterile filter into a 2nd RNase free tube. A small aliquot of the primary stock was diluted to 1 mg/ml for analysis of the concentration using Nanodrop. The analytical sample was vortexed three times with manual inversion to mix thoroughly. Then, the UV absorbance of the sample was measured twice at 260 nm with Nanodrop (the pedestal was rinsed and wiped three times before applying the sample). The test sample was discarded once the analysis was complete. The sample was considered ready for dosing if UV absorbance was between 90 and 110% of the sample. If UV absorbance exceeded 110% of the sample, a secondary dilution was prepared; if the absorbance was <90%, the sample was prepared at a higher initial concentration and similar steps were followed as described above. Samples were stored at 4° C. until use.

[0486] Freehand Intracerebroventricular (ICV) Injection: ICV injections were performed using a Hamilton micro syringe fitted with a 27 or 30-gauge needle, according to the method of Haley and McCormick. The needle was equipped with a polyethylene guard at 2.5-3 mm from the tip in order to limit its penetration into the brain. Mice were anesthetized using isoflurane anesthetic (1-4%). Once sufficiently anesthetized, the mice were held by the loose skin at the back of the neck with the thumb and first fingers of one hand. Applying gentle but firm pressure, the head of the animal was then immobilized by pressing against a firm flat level surface. Dosing was conducted using 10 μl Hamilton syringes fitted with a 27% g needle. The needle tip was then inserted through the scalp and the skull, about 1 mm lateral and 1 mm caudal to bregma (i.e., right of the midline, about 3 mm back as measured from the eye line). Once the needle was positioned, the ASO was given in a volume of 5 μl in saline vehicle and injected over ˜30 seconds. The needle was left in place for 5-10 seconds before removal. The mice were returned to their home cage and allowed to recover for ˜2-4 min. Mice were observed continuously for 30 minutes immediately after dosing for adverse behavioral effects of drug and/or dosing. During this time, any mouse that convulsed more than 3 separate times was immediately euthanized and given an automatic score of 20. Drug tolerability was scored 1 hr±15 min post dosing. Animals dosed with non-tolerated compounds (tolerability score >4) were euthanized immediately following the 1 hr evaluation.

[0487] ASO Tolerability Assessment: Animals dosed with the ASOs were evaluated right after the dosing and monitored for 2 hours for any adverse effects. For acute tolerability (AT) studies, mice were evaluated at the time of dosing and again at the takedown, i.e., 3 days post ASO injection. For long term health assessment, the mice were weighed weekly and monitored for any health and behavioral issues until the completion of the experiment. Mice that had weight losses of greater than 15% of their initial body weight or exhibited tolerability issues were removed from the studies and euthanized. Health and tolerability assessments were conducted according to the following chart:

TABLE 5
Tolerability scoring system^{a}

| Category | Score 1 | Score 2 | Score 3 | Score 4 |
|---|---|---|---|---|
| Hyperactivity, | Very slightly | Increased home | Moderately | Marked |
| stereotypies, | increased home | cage exploration | increased home | hyperactivity |
| home cage | cage exploration | (e.g. digging, | cage activity | Marked |
| behavior | or rearing | burying, etc.) | Detectable | stereotypies |
| | compared to | Increased | stereotypies (e.g. | |
| | controls | grooming | circling, repetitive | |
| | | | behaviors, etc.) | |
| Decreased | Some reduction | Drowsiness | Stupor (reduced | Coma (does not |
| vigilance, | in exploratory | Slightly reduced | responsiveness, | respond to |
| exploration | activity | response to touch | decreased corneal | stimulation, e.g. |
| and | Responds | or handling | reflex) | pinch), no corneal |
| responsiveness | normally to | | | reflex |
| | stimulation | | | |
| Motor | Mild change to | Reduced grip | Highly reduced | Severe ataxia |
| coordination | gait or grip | strength (falls in | grip strength (falls | (e.g. crawling, |
| and strength | strength (falls | less than 5 sec) | in less than 2 sec) | fails to grip bar) |
| | between 5-10 sec) | Mild ataxia (e.g. | Ataxia (e.g. | No ability to right |
| | No falls, normal | slow righting | staggering, falling | |
| | righting response | response, swaying) | impaired walking) | |
| Posture, | Very slight | Slight abnormal | Moderately | Markedly |
| appearance, | abnormal posture | posture (e.g. | abnormal posture | abnormal posture |
| breathing | (subtle) | hunched, extended, | (e.g. ventral | (e.g. lateral |
| | | low posture, tail | recumbency) | recumbency) |
| | | position, straub | Shallow breathing | Facial paralysis |
| | | tail) | | (e.g. drooling, |
| | | Piloerection | | protruding tongue) |
| | | or ptosis | | Labored breathing |
| | | unkempt coat | | |
| Tremor, | Detectable | Hyper-responsive | Few or partial | Repeated or |
| hyper-activity, | tremor | to stimuli (e.g. | seizures, rearing | continuous seizure |
| convulsion | | noise) | and falling as part | (running, |
| | | Marked tremors | of convulsing | bouncing, clonic |
| | | | | and/or tonic) |

^{a}Normal is scored as “0”. Animals are scored on an individual basis at successive time points post dosing.

[0488] Observations are rated at 1 h±15 min, then 24 h±2 h, then 7 days (if appropriate). Convulsions count for the 1 hr timepoint, even if they occur prior to the observation window. A total tolerability score is calculated based on the sum of the individual category scores, with a maximum possible score of 20.

[0489] Tissue Collection: Following final behavioral and health assessments, mice were decapitated on a guillotine and the brains were quickly removed. Each brain was split into two hemispheres and a) hippocampus was dissected for mRNA measurements in the 3-day acute tolerability studies; b) hippocampus, brain stem, and striatum from one hemisphere were dissected for mRNA measurements, whereas the same regions were dissected from the second hemisphere for protein/PK measurements in the dose-response time course PK/PD studies.

[0490] In some of the studies, the blood and the cerebrospinal fluid (CSF) were also collected for PK (blood) and PK/protein (CSF) measurements. To collect the blood and the CSF, the mice were deeply anesthetized with Isoflurane (4%). Blood was collected via cardiac puncture using 23G needle. Once removed, the blood was transferred into 2 ml BD Microtainer (K2EDTA BD #365974) tubes and placed on ice until processing. To process the blood, the tubes were centrifuged at 4500×g for 10 min at 4° C. Then, the plasma was removed and placed into 0.5 ml Eppendorf tubes and stored at −80° C. until use. To collect the CSF, the thoracic cavity was opened exposing the heart, and as much of the blood was drained to avoid contamination of the CSF. The CSF samples were collected via Cisterna magna using micropipettes and placed into lo-bind protein Eppendorf tubes. Then, the tubes were centrifuged at 4500×g for 15 min at 4° C. The CSF was carefully transferred to clean lo-bind 0.5 ml Eppendorf tubes and stored at −80° C. until further use.

### Cyno Data

[0491] Subject: Male cynomolgous monkeys weighing 3.5-10.0 kg at the start of the study were used. Each was implanted with an intrathecal cerebrospinal fluid (CSF) catheter entering at the L3 or L4 vertebrae. The distal tip of the polyurethane catheter extended within the intrathecal space to approximately the L1 vertebrae. The proximal end was connected to a subcutaneous access port located on the animal's lower back. Animals were allowed to heal for at least two weeks prior to the start of the study. Laboratory animal care was according to Public Health Service Policy on the Humane Care and Use of Laboratory Animals and the Guide for the Care and use of Laboratory Animals NRC (2011) (National Research Council: Guide for the Care and Use of Laboratory Animals (The National Academies Collection: Reports funded by National Institutes of Health). National Academies Press (US), Washington (DC)). The protocol was approved by the Wallingford Animal Care and Use Committee of the Bristol-Myers Squibb Company.

[0492] CSF & Blood Sampling: The CSF port was accessed subcutaneously using aseptic techniques, and CSF was sampled from awake animals sitting upright in a primate restraint chair. Approximately 0.1 ml of CSF was discarded at the start of collection to clear dead space in the catheter and port. CSF was collected by gravity flow to a maximum of 0.5 ml CSF per sample. CSF was spun at 2,000 g at 4° C. for 10 min. The supernatant was frozen on dry ice or in liquid nitrogen and kept at −90° C. until analyzed.

[0493] Blood was sampled from an available vein, typically the saphenous vein. Blood samples were prepared in a number of procedures depending upon the particular measure in question. For plasma, blood was collected into EDTA-treated tubes. For serum, blood was collected into serum-separator tubes and allowed to clot for at least 30 min prior to centrifugation. For measures of clotting and clotting factors, blood was collected into citrated tubes, and for analysis of RNA, blood was collected into tubes containing RNA later. After processing, samples were frozen on dry ice or in liquid nitrogen and kept frozen until analyzed.

[0494] Intrathecal Dosing: Animals were trained to be dosed while awake and using modified commercially-available restraint chairs, animals were maintained in a prone position. SNCA-targeted anti-sense oligonucleotides (ASOs) were dissolved in saline, sterilized by filtration, and administered at 0.33 ml/min in a 1.0 ml volume followed by a 0.5 ml sterile water flush. Total infusion time was 4.5 min. Animals remained in the prone position for 30 min post infusion.

[0495] Necropsy: Cynomolgus monkeys were administered the appropriate volume of a commercially available euthanasia solution while anesthetized with ketamine and/or isoflurane. Necropsy tissues were obtained immediately thereafter and the brain was transferred to wet ice for dissection. Areas of interest were dissected using 4-6 mm slices in an ASI Cyno Brain Matrix as well as free handed techniques. Samples were placed fresh in RNAlater, or frozen on dry ice for later analysis. CNS tissue was rapidly dissected form cynomolgus monkeys and pieces no longer than 4 mm on any axis were collected and placed in 5 mLs of RNA later. Samples were stored at 4° C. overnight then transferred to −20° C. for storage until analyzed.

[0496] Brain regions analyzed included medulla, pons, midbrain, cerebellum, caudate-putamen (left and right), hippocampus (left and right), frontal cortex (left and right), temporal cortex (left and right), parietal cortex (left and right), occipital cortex (left and right) and cortical white matter. Additionally, spinal cord was sampled at the cervical, thoracic and lumbar regions. Samples were also collected from liver, kidney and heart. On some occasions, samples of trigeminal nuclei, tibial nerve and the aorta were collected to examine off-target pharmacology in those areas.

### ELISA Quantitation of ASO Concentration in Mouse or Monkey Tissue, Plasma, and CSF:

[0497] Tissue was homogenized with plasma and water in a 1:1 ratio. Standard curve was generated by 2-fold serial dilution from 5000 to 4.9 nM in plasma (for plasma and CSF) and in plasma:water (for tissues samples) and then further diluted to 5000-fold total with 5×SSCT (750 mM NaCl, and 75 mM sodium citrate, pH 7.0, containing 0.05% (v/v) Tween-20) alone and in 5×SSCT containing 35 nM capture and 35 nM detection reagents to obtain a standard range of 1-1000 μM. The dilution factor used varied depending on the expected sample concentration range. The capture probe was AAAGGAA with a 3′ Biotin (Exiqon) and the detection probe was 5′ DigN-isopropyl 18 linker--GTGTGGT (Exiqon).

[0498] Experimental samples and standards were added to Clarity lysis buffer (Phenomenex, cat#AL0-8579) in a 1:1 ratio prior to dilution with capture and detection buffer and before transferring to the ELISA plate. CSF samples were diluted with plasma (2-fold) prior to addition of lysis buffer. A streptavidin-coated plate (Thermo 15119) was washed 3 times with 5×SSCT buffer. 100 μl samples were added and incubated for 60 min at room temperature. The detection probe, 100 μl anti-Dig-AP Fab fragment diluted 1:4000 in PBS containing 0.05% Tween-20 (Roche Applied Science, Cat. No. 11 093 274 910), was added and incubated for 60 min at room temperature. After washing the plate with 2×SSCT buffer, 100 μl Tropix CDP-star Sapphire II substrate (Applied Biosystems) was added for 30 min at room temperature. Antisense oligonucleotide concentrations were measured by luminescence (Enspire-PerkinElmer).

### Alpha-Synuclein Protein Measurements:

[0499] Brain tissue samples were homogenized at 10 ml/g tissue in RIPA buffer (50 mM Tris HCl, 150 mM NaCl, 1% NP-40, 0.5% sodium deoxycholate, 0.1% sodium dodecyl sulfate) using bead homogenizer Qiagen Tissuelyser II for 25 cycles/sec, with a 5 mm stainless steel bead for 2 min total. Homogenized samples were incubated 30 min on ice. 50 μl aliquot of each sample was retained for PK analysis. The remaining samples were centrifuged 20,800 g, for 60 min, 4° C. The supernatant was retained and used for analysis. Total protein was measured using Pierce BCA protein assay kit (23227).

[0500] Brain tissue extracts: SNCA protein was measured using the MJFR1+4B12 ELISA. Briefly, ELISA plates (Costar) were coated with 100 μl of the anti-SNCA antibody MJFR1 (Abcam) at a concentration of 0.1 μg/ml diluted in BupH carbonate-bicarbonate buffer, pH 9.4 (Thermo Scientific) overnight (O/N) at 4° C. The next day plates were washed 4-times with Dulbecco's PBS (Life Technologies) and blocked with 3% BSA (bovine serum albumin, protease free, Fraction V, Roche Diagnostic) in PBS for 2-3 h at room temperature (RT) or overnight at 4° C. Both the standards and the brain samples were diluted with 1% BSA/0.05% Tween/PBS containing Roche protease inhibitor (Roche 11836145001, 1 pellet/25 ml) and Phosphatase Inhibitor 2&3 (Sigma, 1:100). SNCA wild-type (rPeptide) was used as a standard. Samples were loaded in duplicate (50 μl/well) and incubated for O/N at 4° C. After plates were equilibrated to RT, 50 μl of the detection antibody 4B12 (Biolegend) (diluted 1:4000 in 1% BSA/0.1% Tween/DPBS) was added to each well and co-incubated with the samples at RT for ˜2 hours. Detection antibody was pre-conjugated with alkaline phosphatase (AP kit from Novus Biologicals). Plates were then washed 4-times with 0.05% Tween/PBS and developed with 100 μl of alkaline phosphatase substrate (Tropix CDP Star Ready-to-Use with Sapphire II, T-2214, Life Technologies) for 30 minutes. Luminescence counts were measured with Perkin Elmer EnVision (2102 Multilabel Reader). The plates were kept constant shaking (Titer plate shaker, speed 3) during the assay. Data was analyzed using GraphPad Prism. Total protein in brain tissue was measured using a Micro protein assay kit (Thermofisher #23235) according to manufacturer's instructions.

[0501] Cerebral spinal fluid (CSF): SNCA protein was measured using the U-PLEX Human SNCA Kit: (cat# K151WKK-2, Meso Scale Discovery) according to manufacturer's instructions. CSF samples were diluted 10-fold. Hemoglobin was measured in CSF samples using the Abcam mouse Hemoglobin ELISA kit (ab157715). CSF samples were diluted 40-fold for the hemoglobin measurements.

mRNA Measurements by qRT-PCR

[0502] Brain regions were harvested and placed in 1.5 ml RNA-later Tissue Protect tubes (Qiagen cat#76514) that were prefilled with RNA-later, a RNA stabilization solution. Tissue in RNA-later solution can be stored at 4° C. for 1 month, or at −20° C. or −80° C. indefinitely.

[0503] RNA Isolation: RNeasy Plus Mini Kit: RNA from mouse hippocampus and cortex and was isolated using the RNeasy Plus Mini Kit (Qiagen cat#74134). Tissue samples were homogenized in a volume of 600 μL or 1200 μL RLT Plus buffer containing 10 μl/ml of 2-mercaptoethanol and 0.5% Reagent Dx. 600 μL lysis buffer was used if the tissue sample was <20 mg, 1200 μl lysis buffer was used for tissue samples >20 mg. For homogenization, tissue sample was transferred to a 2.0 mL round-bottom Eppendorf Safe-Lock tube (Eppendorf cat#022600044) containing 600 μL RLT Plus Buffer (plus 10 ul/ml of 2-mercaptoethanol and 0.5% Reagent Dx), and a 5 mm stainless steel Bead (Qiagen cat#69989) Samples were homogenized, using a Qiagen's TissueLyser II instrument. Samples were processed for 2.0 min at 20 Hz, samples rotated 180° and processed for another 2.0 min at 20 Hz. Samples were then processed 2.0 min at 30 Hz, samples rotated 180° and processed for another 2.0 min at 30 Hz. Longer and/or at higher frequency homogenization used if processing not complete. A 600 μL of the tissue lysate was then transferred into a gDNA Eliminator spin column in a 2.0 mL collection tube and samples centrifuged for 30 secs at 10,000 g. All centrifugation steps were performed at RT. The flow-through was collected and an equal volume of 70% ethanol added and mixed. 600 μL was transferred to RNeasy spin column placed in a 2.0 mL collection tube and samples centrifuged for 15 secs at 10,000 g. The flow-through was discarded and the remaining 600 ul sample added to the spin column. The spin columns were centrifuged and the flow-through discarded. Columns were washed with 700 μl of Wash Buffer RW1, centrifuged for 15 secs at 10,000 g, and the flow-through discarded The columns were then washed 2-times with 500 μL of Buffer RPE containing 4 volumes of ethanol as described in kit protocol. Columns were first centrifuged for 15 secs at 10,000 g for first wash and then for 2.0 min at 10,000 g for the second wash. After second wash, columns were centrifuged once for 1.0 min at 10,000 g to dry the membranes. Columns were then transferred to a new 1.5 mL collection tube and 30 μl of RNase-free water was added directly to the center of the membrane. The membranes were allowed to incubate for 10 min at RT. Then, the columns were centrifuged for 1.0 min at 10,000 g to elute the RNA. The elution, containing the RNA, was collected and stored on ice until the RNA concentrations could be determined by UV absorbance using a NanoDrop Spectrophotometer (Thermo). RNA samples were stored at −80° C.

[0504] RNA Isolation: RNEASY® Plus Universal Mini Kit: RNA from all other Cyno, Mouse, and Rat tissue samples was isolated using RNEASY® Plus Universal Mini Kit (Qiagen cat#73404). For homogenization, 50 μg or less of tissue sample was transferred to a 2.0 mL round-bottom Eppendorf Safe-Lock tube (Eppendorf cat#022600044) containing 900 μL QIAZOL® Lysis Reagent, and a 5 mm stainless steel Bead (Qiagen cat#69989) Samples were homogenized, using a Qiagen's TissueLyser II instrument. Samples were processed for 2.0 min at 20 Hz, samples rotated 180° and processed for another 2.0 min at 20 Hz. Samples were then processed 2.0 min at 30 Hz, samples rotated 180° and processed for another 2.0 min at 30 Hz. Longer and/or at higher frequency homogenization used if processing not complete. Homogenized tissue lysate was then transferred into a new 2.0 mL round-bottom Eppendorf Safe-Lock tube and left at RT for 5.0 min. 100 μL of gDNA Eliminator Solution was added to each tube and tubes were vigorously shaken for 30 secs. 180 μL of Chloroform (Sigma cat#496189) was added to each tube and tubes were vigorously shaken for 30 secs. Tubes were left at RT for 3 min. Centrifuge tubes at 12,000 g for 15 min at 4° C. After centrifugation the upper aqueous phase was transferred to a new 2.0 mL round-bottom Eppendorf Safe-Lock tube ˜500 μL. An equal volume of 70% ethanol added and mixed. All future centrifugation steps were performed at RT. 500 μL was transferred to RNeasy spin column placed in a 2.0 mL collection tube and samples centrifuged for 15 secs at 10,000 g. The flow-through was discarded and the remaining 500 μl sample added to the spin column. The spin columns were centrifuged and the flow-through discarded and the columns washed with 700 μl of Wash Buffer RWT containing 2 volumes of ethanol. Columns were centrifuged for 15 secs at 10,000 g, the flow-through discarded. The columns were then washed twice with 500 μL of Buffer RPE containing 4-volumes of ethanol as described in kit protocol. Columns were first centrifuged for 15 secs at 10,000 g for first wash and then for 2.0 min at 10,000 g for the second wash. After second wash, columns were centrifuged once for 1.0 min at 10,000 g to dry the membranes. Columns were then transferred to a new 1.5 mL collection tube and 30 μl of RNase-free water added directly to the center of the membrane. Membranes were allowed to incubate for 10 min at RT. Columns were centrifuged for 1.0 min at 10,000 g to elute the RNA. The elutions, containing the RNA, were collected and stored on ice until RNA concentration determined by UV absorbance using a NanoDrop Spectrophotometer (Thermo). RNA samples were stored at −80° C.

[0505] cDNA Synthesis by Reverse Transcription: 300 ng of RNA was diluted to a final volume of 10.8 μL using nuclease-free water (Invitrogen cat#10977-015) in a PCR-96-AB-C microplate (Axygen cat#321-65-051). Added 6.0 μL to each well of reaction mix 1 containing the following: 2.0 μL of 50 μM random decamers (Ambion cat#AM5722G) and 4.0 μL of a 1×dNTP mix (Invitrogen cat#10297-018). The plate was sealed with optical sealing tape (Applied Biosystems cat#4360954) and centrifuged for 1.0 min at 1,000×g at RT. Next, the plate was heated for 3.0 min at 70° C. using a 96-well Thermal Cycler GeneAmp PCR System 9700 (Applied Biosystems). The plate was then cooled completely on ice. Next, 3.25 μL of the reaction mix 2 (containing 2 μL of 10× strand buffer, 1.0 μL of MMLV-RT 200 U/μL reverse transcriptase enzyme (Ambion cat#2044), and 0.25 μL of RNase inhibitor 40 U/μL (Ambion cat#AM2682)) were added to each of the wells. Plate was sealed with optical sealing tape and centrifuged for 1.0 min at 1,000×g at RT. Using a 96-well Thermal Cycler, the plate was heated at 42° C. for 60 min proceeded by 95° C. for 10 min. Then, the plates were cooled on ice. The cDNA plates were stored at −20° C. until ready to use for PCR analysis. qPCR for amplification and quantification of alpha synuclein and GAPDH mRNA expression: cDNA was diluted 5-fold in nuclease free water in a PCR-96-AB-C microplate. 16 μL of Master Mix solution consisting of the following: 10 μL of 2× Taqman Gene Expression Master Mix (Applied Biosystems cat#4369016), 1.0 μL of 20× Taqman primer-probe set (Applied Biosystems), and 5.0 μL of nuclease-free water, was added to each well of a 384-well optical PCR plate (Applied Biosystems cat#4483315). 4.0 μL of diluted cDNA was added to each well of the 384-well optical PCR plate. Plate was sealed with optical sealing tape and centrifuged for 1.0 min at 1,000×g at RT. PCR was performed on the Applied Biosystems 700 HT Fast Real-Time PCR System using the following parameters in standard mode: 50° C. for 2.0 min, 95° C. for 10 min, followed by 40 cycles of 95° C. for 15 secs and 60° C. for 1.0 min.

[0506] qRT-PCR primer-probe sets: Primer-probes sets from Applied Biosystems (Thermo Fisher) included the following:

[0507] Human alpha synuclein (cat#Hs01103383_m1) FAM labelled

[0508] Human PROS1 (cat#HS00165590_m1) FAM labelled

[0509] Cyno alpha synuclein (cat#Mf02793033_ml) FAM labelled

[0510] Cyno GAPDH (cat#Mf04392546_g1) FAM labelled

[0511] Cyno GAPDH (cat#Mf04392546_g1) VIC labelled Primer Limited

[0512] Rat alpha synuclein (cat#Rn01425141_m1) FAM labelled

[0513] Rat GAPDH (cat#Rn01775763-g1) FAM labelled

[0514] Rat GAPDH (cat#4352338E) VIC labelled Primer Limited

[0515] Mouse GAPDH (cat#Mm99999915-g1) FAM labelled

[0516] Mouse GAPDH (cat#4352339E) VIC labelled Primer Limited.

[0517] The results are shown in Table 6 below.

[0518] Table 6 shows the tolerability score (“Tox Score”) and the percent reduction (or knockdown, “KD”) of both the SNCA mRNA and SNCA protein expression in ASO-treated A53T-PAC transgenic or WT (wild-type) mice. The tolerability scores are provided for days 1 (1D) and 28 (28D) post ASO administration. The percent reduction in SNCA mRNA and SNCA protein expression is shown for days 3 (3D) and 28 (28D) post ASO administration in the hippocampus (Hippo), brain stem (BS), and striatum (Str).

| | | | | Tox | 28 D | 28 D | 28 D | 28 D | 28 D | 28 D |
|---|---|---|---|---|---|---|---|---|---|---|
| | Tox | 3 D | Tox | Score | mRNA | mRNA | mRNA | protein | protein | protein |
| | Score | mRNA | Score | WT | % KD | % KD | % KD | % KD | % KD | % KD |
| ASO_NO | @1 D | % KD | @28 D | @28 D | Hippo | BS | Str | Hippo | BS | Str |
| 001221 | 1.17 | | | | | | | | | |
| 001233 | 4.67 | | | | | | | | | |
| 001268 | 3.33 | 40.44 | 1.11 | | 46.53 | | | 6 | 18 | 28 |
| 001281 | 2 | | | | | | | | | |
| 001282 | 0.17 | | | | | | | | | |
| 001308 | 1 | | | | | | | | | |
| 001310 | 8.67 | | | | | | | | | |
| 001318 | 2.4 | | | | | | | | | |
| 001328 | 1.33 | | 3.7 | | 76.07 | | | | | |
| 001334 | 6.67 | | | | | | | | | |
| 001344 | 5.17 | | | | | | | | | |
| 001357 | 1.83 | | | | | | | | | |
| 001363 | 1.67 | | | | | | | | | |
| 001365 | 3 | | | | | | | | | |
| 001367 | 0.5 | | | | | | | | | |
| 001384 | 0 | | | | | | | | | |
| 001395 | 0.33 | | | | | | | | | |
| 001467 | 7 | | | | | | | | | |
| 001468 | 2 | | 1 | | 44.52 | | | | | |
| 001471 | 0 | | | | | | | | | |
| 001481 | 0 | | | | | | | | | |
| 001484 | 0 | | | | | | | | | |
| 001486 | 9 | | | | | | | | | |
| 001532 | 2.4 | | | | | | | | | |
| 001537 | 2.5 | | | | | | | | | |
| 001549 | 4 | | | | | | | | | |
| 001554 | 0.67 | | | | | | | | | |
| 001560 | 0 | | | | | | | | | |
| 001561 | 3.67 | | | | | | | | | |
| 001582 | 3.33 | | | | | | | | | |
| 001585 | 1.83 | | | | | | | | | |
| 001605 | 2.67 | | 0.9 | | 68.71 | | | | | |
| 001606 | 1.17 | | 0.38 | | 35.19 | | | | | |
| 001638 | 0.17 | | | | | | | | | |
| 001639 | 1.8 | | 3.22 | | 45.2 | | | | | |
| 001665 | 1.83 | 48.79 | 0.85 | | 42.43 | 37.6 | 29.78 | 40 | 39 | 23 |
| 001669 | 6 | | | | | | | | | |
| 001671 | 8.5 | | | | | | | | | |
| 001673 | 2.33 | | | | | | | | | |
| 001677 | 14.67 | | | | | | | | | |
| 001694 | 4.33 | | | | | | | | | |
| 001702 | 1.2 | | 3.11 | | 40.84 | | | | | |
| 001730 | 1.33 | | | | | | | | | |
| 001755 | 1.83 | | | | | | | | | |
| 001757 | 3.17 | | | | | | | | | |
| 001774 | 5.83 | | | | | | | | | |
| 002041 | 10.33 | | | | | | | | | |
| 002686 | 6 | | | | | | | | | |
| 002690 | 4.67 | | | | | | | | | |
| 002692 | 10.17 | | | | | | | | | |
| 002693 | 4.67 | | | | | | | | | |
| 002694 | 2.92 | 68.84 | 20 | | | | | | | |
| 002705 | 13 | | | | | | | | | |
| 002730 | 7 | | | | | | | | | |
| 002738 | 0.5 | 61.37 | 0.14 | | 21.86 | | | | | |
| 002739 | 2.45 | 54.89 | 0 | | 56.01 | 39.56 | 31.85 | | | |
| 002761 | 0.2 | 56.99 | 0.78 | | 43.68 | | | | | |
| 002762 | 0 | 66.77 | 0 | | 56.42 | 44.29 | 36.57 | | | |
| 002763 | 0 | 30.72 | | | | | | | | |
| 002765 | 9.33 | | | | | | | | | |
| 002779 | 5.33 | 73.12 | | | | | | | | |
| 002785 | 1.06 | 55.86 | 20 | | | | | | | |
| 002798 | 5.17 | | | | | | | | | |
| 002801 | 15.67 | | | | | | | | | |
| 002804 | 0.75 | 49.67 | 20 | | | | | | | |
| 002805 | 11.67 | | | | | | | | | |
| 002817 | 7.83 | | | | | | | | | |
| 002820 | 0.17 | 33.91 | | | | | | | | |
| 002825 | 3.67 | 38.94 | | | | | | | | |
| 002828 | 3.83 | 34.63 | | | | | | | | |
| 002832 | 3.33 | 52.91 | | | | | | | | |
| 002833 | 2.95 | 68.25 | 0.67 | | 36.09 | 31.75 | 34.77 | 32 | 33 | 32 |
| 002836 | 3.5 | 43.36 | | | | | | | | |
| 002837 | 6.72 | 70.55 | 0 | | 49.92 | 40.11 | 32.79 | | | |
| 002838 | 1.17 | 39.98 | | | | | | | | |
| 002842 | 8.2 | 67.24 | 20 | | | | | | | |
| 002843 | 1.67 | 61.22 | | | | | | | | |
| 002844 | 3.33 | 36.06 | | | | | | | | |
| 002847 | 0.17 | 49.42 | | | | | | | | |
| 002848 | 1.25 | 55.38 | 1.78 | | | | | | | |
| 002849 | 3.83 | 30.6 | | | | | | | | |
| 002850 | 4.67 | 49.15 | | | | | | | | |
| 002852 | 1 | 41.36 | | | | | | | | |
| 002858 | 3.67 | 48.1 | | | | | | | | |
| 002859 | 9.33 | 64.97 | | | | | | | | |
| 002860 | 6.83 | 57.18 | | | | | | | | |
| 002863 | 1.67 | 46.96 | | | | | | | | |
| 002864 | 1.33 | 48.12 | | | | | | | | |
| 002867 | 10.5 | | | | | | | | | |
| 002901 | 10 | | | | | | | | | |
| 002904 | 1.12 | 59.49 | 1.25 | | | | | | | |
| 002906 | 4.33 | | | | | | | | | |
| 002908 | 2.5 | 32.81 | | | | | | | | |
| 002909 | 16.33 | | | | | | | | | |
| 002911 | 2.33 | 28.97 | | | | | | | | |
| 002912 | 1 | 48.24 | | | | | | | | |
| 002935 | 6.33 | | | | | | | | | |
| 002938 | 4.43 | 46.49 | | | | | | | | |
| 002968 | 3.05 | 65.11 | 20 | | | | | | | |
| 002982 | 4.67 | | | | | | | | | |
| 002983 | 12 | | | | | | | | | |
| 002989 | 12.67 | | | | | | | | | |
| 002990 | 10.67 | | | | | | | | | |
| 002991 | 9 | | | | | | | | | |
| 002992 | 14 | | | | | | | | | |
| 002993 | 7.71 | | | | | | | | | |
| 002994 | 9.33 | | | | | | | | | |
| 002995 | 2 | 42.3 | | | | | | | | |
| 003058 | 8.67 | | | | | | | | | |
| 003061 | 4.33 | 49.84 | | | | | | | | |
| 003063 | 0.67 | 48.41 | | | | | | | | |
| 003069 | 0.6 | 46.48 | | | | | | | | |
| 003072 | 9.6 | | | | | | | | | |
| 003080 | 15.33 | | | | | | | | | |
| 003092 | 1.78 | 60.45 | 0.13 | | 58.79 | 41.16 | 42.86 | | | |
| 003172 | 4.5 | 49.72 | | | | | | | | |
| 003173 | 0.5 | 58.71 | 0.8 | | 57.56 | 34.34 | 32.72 | 43 | 41 | 51 |
| 003175 | 0.33 | 60.31 | | | 61.03 | 40.44 | 43.33 | | | |
| 003176 | 0.1 | 64.56 | 0.13 | | 45.9 | 23.89 | 35.99 | 42 | 27 | 27 |
| 003177 | 0 | 43.64 | | | | | | | | |
| 003179 | 0 | 63.6 | 1.3 | | 56.07 | 36.86 | −9.84 | 54 | 35 | 56 |
| 003181 | 0.67 | 44.36 | | | | | | | | |
| 003198 | 0.67 | 46.33 | | | | | | | | |
| 003199 | 1.33 | 43.74 | | | | | | | | |
| 003202 | 0 | 49.56 | | | | | | | | |
| 003203 | 7.5 | | | | | | | | | |
| 003206 | 4 | 47 | | | | | | | | |
| 003226 | 9.67 | | | | | | | | | |
| 003229 | 1.17 | 64.32 | | | 48.4 | 37.47 | 37.26 | | | |
| 003231 | 10 | | | | | | | | | |
| 003279 | 8.33 | | | | | | | | | |
| 003323 | 6.67 | 65.91 | | | | | | | | |
| 003330 | 6.83 | 54.69 | | | | | | | | |
| 003345 | 2.52 | 68.56 | 0 | | 53.82 | 34.6 | 34.81 | | | |
| 003349 | 0.83 | 55.42 | | | | | | | | |
| 004871 | 7.00 | 65.13 | | | 51.22 | 45.50 | 43.72 | | | |
| 004881 | 16.00 | | | | | | | | | |
| 004885 | 6.00 | 58.31 | | | 49.31 | 41.08 | 52.78 | | | |
| 004901 | 4.40 | 63.12 | | | 61.97 | 43.13 | 44.91 | | | |
| 004902 | 0.00 | 59.68 | | | 41.82 | 24.44 | 19.42 | | | |
| 004903 | 4.00 | 46.00 | | | | | | | | |
| 004910 | 0.40 | 45.27 | | | | | | | | |
| 004913 | 4.80 | 48.56 | | | | | | | | |
| 004917 | 1.00 | 32.38 | | | | | | | | |
| 004932 | 8.00 | 49.21 | | | | | | | | |
| 004934 | 6.40 | 44.30 | | | | | | | | |
| 004936 | 4.00 | 33.89 | | | | | | | | |

### Example 5: Analysis of In Vivo Activity and Tolerability of SNCA-Targeted Antisense Oligonucleotides (ASOs) in Cynomolgous Monkeys

[0519] To evaluate the ASO activity and tolerability in vivo, an intrathecal ported Cynomolgus monkey model (Cyno IT) was developed. This model enables the evaluation of ASO—003092- or ASO—003179-mediated knockdown of SNCA and alpha-synuclein protein SNCA.

[0520] As described above in Example 3, each animal was implanted with an intrathecal cerebrospinal fluid (CSF) catheter entering at the L3 or L4 vertebrae. ASO—003179 and ASO—003092 were dissolved in saline and administered to the animals, infused over 4.5 min using the IT port (2 animals per dose group). Each of the animals received one of the following: (i) ASO—003179 (8 or 16 mg total) and (ii) ASO—003092 (4 or 8 mg total). Animals were then euthanized at various time points post dosing, when the tissues were harvested for analysis of the ASO exposure and activity. Brain regions analyzed included medulla (Med), pons (V-Pons), midbrain (V-MB), cerebellum (CBL), caudate-putamen (left and right) (CauP), hippocampus (left and right) (Hip), frontal cortex (left and right) (FrC), temporal cortex (left and right) (TeC), parietal cortex (left and right) (PaC), occipital cortex (left and right) (Occ), and cortical white matter (WM). Additionally, spinal cord was sampled at the cervical (CSC), thoracic (TSC), and lumbar (LSC) regions. Samples were also collected from liver, kidney, heart, trigeminal nuclei, tibial nerve, and aorta to examine off-target pharmacology in those areas.

[0521] The ASOs were well tolerated in cyno with no adverse effects being observed (data not shown). And as shown in Figures. 3 and 4 and Table 7 below, the administration of ASO—003179 resulted in the reduction of SNCA mRNA expression in all brain tissues analyzed at 2 weeks post dosing at a dose of both 8 mg and 16 mg. (FIG. 3). For ASO—003092, reduction was observed in the frontal cortex and the lumbar spinal cord but not in other tissues at 2 weeks post dosing (FIG. 4).

TABLE 7
Effect of ASOs on brain SNCA mRNA levels in cyno brain

| | Dose | Time point | | | | | | | | | | | | | | |
|---|---|---|---|---|---|---|---|---|---|---|---|---|---|---|---|---|
| ASO No. | (mg) | (weeks) | Med | CBL | FrC | PaC | CauP | TeC | Occ | Hip | V-MB | V-Pons | CSC | TSC | LSC | WM |
| 003092 | 4 | 2 | 87 | 132 | 61 | 78 | 111 | 54 | 90 | 58 | 82 | 105 | 70 | 59 | 29 | 65 |
| | 8 | 2 | 93 | 102 | 69 | 95 | 94 | 38 | 71 | 61 | 77 | 86 | 60 | 33 | 23 | 57 |
| 003179 | 4 | 2 | 132 | 110 | 66 | 121 | 126 | 56 | 95 | 101 | 143 | 133 | 100 | 119 | 34 | 123 |
| | 8 | 2 | 44 | 44 | 24 | 39 | 57 | 18 | 34 | 43 | 46 | 58 | 57 | 35 | 19 | 60 |
| | 8 | 2 | 49 | 72 | 45 | 71 | 106 | 46 | 63 | 79 | 107 | 73 | 48 | 42 | 7 | 80 |
| | 16 | 2 | 70 | 85 | 38 | 55 | 70 | 29 | 41 | 51 | 61 | 58 | 20 | 21 | 12 | 56 |

[0522] The results presented here demonstrate that the SNCA-specific ASOs disclosed herein (e.g., ASO—003092 and ASO—003179) effectively reduce SNCA mRNA and are well tolerated in neurons and studies in preclinical species in vivo. Moreover, results from the A53T-PAC neurons confirm that ASO—003092- and ASO—003179-mediated reductions of mRNA result in reductions of SNCA protein levels in vitro and in vivo. Taken together, these findings support the continued development of SNCA-specific ASOs as a disease-modifying therapeutic for the treatment of synucleinopathies.

1. An antisense oligonucleotide comprising a contiguous nucleotide sequence of 10 to 30 nucleotides in length wherein the contiguous nucleotide sequence is at least 90% complementary to an intron region within an alpha-synuclein (SNCA) transcript.

2. The antisense oligonucleotide of claim 1, wherein the intron region is selected from intron 1 corresponding to nucleotides 6336-7604 of SEQ ID NO: 1; intron 2 corresponding to nucleotides 7751-15112 of SEQ ID NO: 1; intron 3 corresponding to nucleotides 15155-20908 of SEQ ID NO: 1 or intron 4 corresponding to nucleotides 21052-114019 of SEQ ID NO: 1.

3. The antisense oligonucleotide of claim 1, wherein the contiguous nucleotide sequence is at least 90% complementary to a nucleic acid sequence within an alpha-synuclein (SNCA) transcript, wherein the nucleic acid sequence is selected from the group consisting of:
i) nucleotides 21052-29654 of SEQ ID NO: 1;
ii) nucleotides 30931-33938 of SEQ ID NO: 1;
iii) nucleotides 44640-44861 of SEQ ID NO: 1;
iv) nucleotides 47924-58752 of SEQ ID NO: 1;
v) nucleotides 4942-5343 of SEQ ID NO: 1;
vi) nucleotides 6336-7041 of SEQ ID NO: 1;
vii) nucleotides 7329-7600 of SEQ ID NO: 1;
viii) nucleotides 7751-7783 of SEQ ID NO: 1;
ix) nucleotides 8277-8501 of SEQ ID NO: 1;
x) nucleotides 9034-9526 of SEQ ID NO: 1;
xi) nucleotides 9982-14279 of SEQ ID NO: 1;
xii) nucleotides 15204-19041 of SEQ ID NO: 1;
xiii) nucleotides 20351-20908 of SEQ ID NO: 1
xiv) nucleotides 34932-37077 of SEQ ID NO: 1;
xv) nucleotides 38081-42869 of SEQ ID NO: 1;
xvi) nucleotides 38081-38303 of SEQ ID NO: 1
xvii) nucleotides 40218-42869 of SEQ ID NO: 1
xviii) nucleotides 46173-46920 of SEQ ID NO: 1;
xix) nucleotides 60678-60905 of SEQ ID NO: 1;
xx) nucleotides 62066-62397 of SEQ ID NO: 1;
xxi) nucleotides 67759-71625 of SEQ ID NO: 1;
xxii) nucleotides 72926-86991 of SEQ ID NO: 1;
xxiii) nucleotides 88168-93783 of SEQ ID NO: 1;
xxiv) nucleotides 94976-102573 of SEQ ID NO: 1;
xxv) nucleotides 104920-107438 of SEQ ID NO: 1;
xxvi) nucleotides 106378-106755 of SEQ ID NO: 1;
xxvii) nucleotides 106700-106755 of SEQ ID NO: 1;
xxviii)nucleotides 108948-114019 of SEQ ID NO: 1; and
xxix) nucleotides 114292-116636 of SEQ ID NO: 1.

4. The antisense oligonucleotide of claim 1, wherein the nucleic acid sequence corresponds to nucleotides 24483-28791 of SEQ ID NO: 1; nucleotides 32226-32242 of SEQ ID NO: 1; nucleotides 44741-44758 of SEQ ID NO: 1 or nucleotides 48641-48659 of SEQ ID NO: 1.

5. The antisense oligonucleotide of claim 1, wherein the contiguous nucleotide sequence comprises a sequence selected from SEQ ID NO: 7 to SEQ ID NO: 1302 or SEQ ID NO: 1309-1353 with no more than 2 mismatches.

6. The antisense oligonucleotide of claim 1, wherein the contiguous nucleotide sequence comprises a sequence selected from SEQ ID NO: 7 through SEQ ID NO: 1302 or SEQ ID NO: 1309 through SEQ ID NO: 1353.

7. The antisense oligonucleotide of claim 1, wherein the contiguous nucleotide sequence comprises a sequence selected from the group consisting of SEQ ID NO: 276; SEQ ID NO: 278; SEQ ID NO: 296; SEQ ID NO: 295; SEQ ID NO: 325; SEQ ID NO: 328; SEQ ID NO: 326; SEQ ID NO: 329; SEQ ID NO: 330; SEQ ID NO: 327; SEQ ID NO: 332; SEQ ID NO: 333; SEQ ID NO: 331; SEQ ID NO: 339; SEQ ID NO: 341; SEQ ID NO: 390; SEQ ID NO: 522 and SEQ ID NO: 559.

8. The antisense oligonucleotide of claim 1, which is a gapmer with at least two nucleotide analogs.

9. The antisense oligonucleotide of claim 1, which comprises the formula of 5′-A-B-C-3′, wherein_:
a) region B is a contiguous sequence of at least 6 DNA units, which are capable of recruiting RNase;
b) region A is a first wing sequence of 1 to 10 nucleotides, wherein the first wing sequence comprises one or more nucleotide analogues and optionally one or more DNA units and wherein at least one of the nucleotide analogues is located at the 3′ end of A; and
c) region C is a second wing sequence of 1 to 10 nucleotides, wherein the second wing sequence comprises one or more nucleotide analogues and optionally one or more DNA units and wherein at least one of the nucleotide analogues is located at the 5′ end of C.

10. The antisense oligonucleotide of claim 9, wherein region A comprises 1-4 nucleotide analogues, region B comprises 8 to 15 DNA units and region C comprises 2 to 4 nucleotide analogues.

11. The antisense oligonucleotide of claim 1, wherein the nucleotide analogues are 2′ sugar modified nucleosides independently selected from the group consisting of Locked Nucleic Acid (LNA); 2′—O-alkyl-RNA; 2′-amino-DNA; 2′-fluoro-DNA; arabino nucleic acid (ANA); 2′-fluoro-ANA, hexitol nucleic acid (HNA), intercalating nucleic acid (INA), 2′—O-methyl nucleic acid (2′—OMe), 2′—O-methoxyethyl nucleic acid (2′-MOE), and any combination thereof.

12. The antisense oligonucleotide of claim 11, wherein the LNA is independently selected from the group consisting of cEt, 2′,4′-constrained 2′—O-methoxyethyl (cMOE), oxy-LNA, alpha-L-oxy-LNA, beta-D-oxy LNA, 2′-0,4′-C-ethylene-bridged nucleic acids (ENA), amino-LNA, or thio-LNA.

13. The antisense oligonucleotide of claim 1, wherein the contiguous nucleotide sequence comprise one or more beta-D-oxy-LNA units.

14. The antisense oligonucleotide of claim 1, wherein at least 50% of the internucleoside linkages within the contiguous nucleotide sequence are phosphorothioate internucleoside linkages.

15. The antisense oligonucleotide of claim 1, wherein the antisense oligonucleotide has an in vivo tolerability less than or equal to a total score of 4, wherein the total score is the sum of a unit score of five categories, which are 1) hyperactivity; 2) decreased activity and arousal; 3) motor dysfunction and/or ataxia; 4) abnormal posture and breathing; and 5) tremor and/or convulsions, and wherein the unit score for each category is measured on a scale of 0-4.

16. The antisense oligonucleotide of claim 1, which reduces expression of SNCA mRNA in a cell exposed to the antisense oligonucleotide by at least 60%, compared to a cell not exposed to the antisense oligonucleotide.

17. The antisense oligonucleotide of claim 1, wherein the contiguous nucleotide sequence comprises, consists essentially of, or consists of a sequence selected from SEQ ID NO: 7 through SEQ ID NO: 1302 and/or SEQ ID NO: 1309 through SEQ ID NO: 1353 with a design selected from the group consisting of the designs in FIGS. 1A through 1C, wherein an upper case letter is a sugar modified nucleoside and a lower case letter is DNA.

18. The antisense oligonucleotide of claim 1, wherein the contiguous nucleotide sequence comprises a sequence and a design selected from the group consisting of:
(SEQ ID NO: 276)
TTCtctatataacatCACT
(SEQ ID NO: 278)
TTTCtctatataacaTCAC;
(SEQ ID NO: 296)
AACTtttacataccACAT;
(SEQ ID NO: 295)
AACTtttacataccaCATT;
(SEQ ID NO: 325)
ATTAttcatcacaatCCA;
(SEQ ID NO: 328)
ATTAttcatcacaATCC;
(SEQ ID NO: 326)
CattattcatcacaaTCCA;
(SEQ ID NO: 329)
CATtattcatcacaATCC;
(SEQ ID NO: 330)
ACAttattcatcacaaTCC;
(SEQ ID NO: 327)
AcattattcatcacaaTCCA;
(SEQ ID NO: 332)
ACATtattcatcacAATC;
(SEQ ID NO: 333)
TACAttattcatcacAATC;
(SEQ ID NO: 331)
TAcattattcatcacaaTCC;
(SEQ ID NO: 339)
TTCaacatttttatttCACA;
(SEQ ID NO: 341)
ATTCaacatttttattTCAC;
(SEQ ID NO: 390)
ACTAtgatacttcACTC;
(SEQ ID NO: 522)
ACACattaactactCATA
and
(SEQ ID NO: 559)
GTCAaaatattcttaCTTC,
wherein upper case letters indicate a 2′ sugar modified nucleoside analogue and lower case letters indicate DNAs.

19. The antisense oligonucleotide of claim 1, wherein the contiguous nucleotide sequence has a the chemical structure selected from the group consisting of ASO—008387; ASO—008388; ASO—008501; ASO—008502; ASO—008529; ASO—008530; ASO—008531; ASO—008532; ASO—008533; ASO—008534; ASO—008535; ASO—008536; ASO—008537; ASO—008543; ASO—008545; ASO—008584; ASO—008226 and ASO—008261.

20. A conjugate comprising the antisense oligonucleotide of claim 1, wherein the antisense oligonucleotide is covalently attached to at least one non-nucleotide or non-polynucleotide moiety.

21. The conjugate of claim 20, wherein the conjugate includes an antibody fragment which has a specific affinity for a transferrin receptor.

22. A pharmaceutical composition comprising the antisense oligonucleotide of claim 1, and a pharmaceutically acceptable carrier.

23. Use of the antisense oligonucleotide of claim 1 for the manufacture of a medicament.

24. Use of the antisense oligonucleotide of claim 1, for the manufacture of a medicament for the treatment of a synucleinopathy in a subject in need thereof.

25. The antisense oligonucleotide of claim 1, for use in medicine.

26. The antisense oligonucleotide of claim 1 for use in the treatment of a synucleinopathy.

27. The antisense oligonucleotide of claim 26, wherein the synucleinopathy is selected from the group consisting of Parkinson's disease, Parkinson's Disease Dementia (PDD), multiple system atrophy, dementia with Lewy bodies, and any combinations thereof.

The application's sequence listing, which the Patent Office published only in electronic form, follows.

SEQUENCE LISTING (1882 sequences)

SEQ ID NO: 1 - DNA, 121198 bp, Homo sapiens
gcacatacaactttaacttcaatattttaatgacgaaatttaaggataatttaaatagaaatggactcagaaaagaatcagtaagacttagtgaaggatcattgtctattatagagaagttgatttaagattaacttattagtaatatttaacatatataaagaattattagactgggtatatagacaagcgttttattcttggaagacaaaaagaagaaaaattgaattcaaccgatgtatacgaaaataaaaagtaacagtaaattaaaaatagataattaaataaatatatgatacagtataacgttttatagccaagatgatgttacaaatccatatttattgacatggatatgtttttatactaaagtgtttatcaaatagccattaagagataacttctttgaataatttgctttctaaatttcttaactacataaatttccagctttatatggaacaccaagttttcaaaccattagtgatgtgctttttatatggtgttaaaaagtttctttctttcttttttctttttcccccaagatggagtcttgctctgtcgcccaggctggagcgcagtagtgcgatctcggctcagtgcaacaaccacctcctgggtacaagcaattctcctgcctcagccccccaagtagctgggattacaggcacctgccaccacgtccagctgatttttgtatttttagtagagacggggttttaccatcttggccaggctggtctctaactcctgacctcaggtaatctgcccacctcagcctcccaaagtgctgagattacaggcgtgagccaccatgcccgacctaaaaagtttcttaaacgtcactttatactctcaaattatctagaaaggaaaacgtattagattcctggatattttggatattgtaaggaacatacttatttgctgtatatactctgtttgtaacagtattgtaacttcagttcaaaacaatacacaaaacattacaagttcccgtgatattttaaaaattcatttattttcttcctttctgaatacaaatgctgttcagtctgttgattcttcactaatctgaaatattagggactgatttctgaattggatattcattctgaagcctttcagagccactggcacaaagggtctgtcaaacttggaacaccatttgttgtatcattttatttttttctcttggcaaatccacataattcatacaggactatgccagtgtcttttgaaagaaacaaggtttaagaaagtaaaaatgttaataaagatagtgaatgttaattctgtcattgttactgtatttcttcaagctgtggctgcaaactgctttgagtgatgttattgtaactcgcacattagggagagaaagagatgtttggtagatttttaattaatgatccctatcaatgctccttgagctttcccactctatctctccacaacttccatccctggttggaaattttttgcttacccatactaagtgagagttattgatgggaaggcatcagatatctcacgtgtgttgctggtgggatgggagactgtggaggatgggaacaggtggaaatctactgcaatggaaaaaaaaaaaaagcatgtcctaggacacccaaaacatggaggctagataataacaatagctacttgtactgagagcttccactctgcctggctctttgctatgagccacattattcattccttacaacaatcaaacaagacaagtaaaatatcatgcccattttttaatgagaaaactagagattagagaggttatagatacttgctctgagtcactagtaatgagtagtagagctttaataagtccctgaatttaggttgtatctagtacatttactcttagaagtctatcatgctcaccagagttgcagagttgcgtgtatttcttgggctcattaatgtgtttttttctttctaaaactaaagtcatttgaacttgttagattttgaaatatttaaatatcttttctatctggctttaacatctttaatcttggaatcttgcatgccttcatattcttaggaccacgaaaccacaggaatatttaaaatgatatctagtggaaacaatatgaagttggccatggggtcaaattagagaatctgaatactatgcttctccttgattgctcttcccatttcttcagagtaaccctattcccccatctcatgctcaccccctttccaaaatcatacataatgatctcccaacagtatgcattaggctttctctactctacccactatgaaattacacaagaagcctatcgcaatctcactacctcgtctctctcacaggtttacagaaggtgagaggaaggtgcagatagagaataagaagcaggtggctccagcatcaacattacatcaccccttgtgttcacaacaaatacggaatattatccaaagataataaacgttgtattttcttaacttaaacacattaaatcagtcctctctttaatcaattgttaatgggcagcatctttattttcatgccattctactctgctgtctttgctatagcacaagtttaccacataccatacctaaaaattcagttgttctatgggggtaaacaaagtctaggttaagcatatatttcatagaatgttaatctatagcaaaattaatgaattaaatccagataaaagaatcctattatggtctggtaaaatatttatatttcacttagcaaagagaaaacaaaacatgaatattgtagttatgaacagaatatgcatgttagtaatgcttccaaatatgttattacttcataacttcatatttcttatgaggtacaagccattcaattagtttaacgttatattcagagaggctaaagatttactgaagaccatgctgtccatcaataatgaaaagaaaaattaaaaaaactttattttaacttctagttcccttctttgtacttgagcagctttccctccttaagaatacagacctagaacatatgcaatatcactatcaatattatgtgtaattaaaagttcattggatgtttactgtgttcaaggcattttaaggagtgacaagagttaaacatatagttgtaattcaaaatgacaacgaaattagtttacagttttctttttttgtaggtagtaagaaatcatctccccctattgaggaataccaatatagaaaaggcaaaactttaaatatgaatgaactgtttcataataacataagttcttcttgatttccattgtcacatccaaatttgaaggctatttctaacacagctgggttctacctttttccttctcactctttaccacacccaatctgtgaggcttcagacacaaactgctaattcaggagacaattgtgccttctgtaacagtttctgctaaattgtctcagctctgccacttaaaatagctaggtgatctcagcatatcaccaaaactcttggagctcagtttctctgtctataaaagttacataaaatgtaattgatctgcttgttatgactaaataacatagtacattagtcctttgccaaaggactaacaaattaccaaataaaagtttggaatcatgttaaacgtttataagaagtgcaactgtccagaaataattctctcacattggtctgttgtaatgagacctaaaatatctcattttatttacctctttgacttaaagcactaggtctcaaggaggtcatggttatactataaatatgtcatgtgaaataatatattaaataattgttgtaatactctattgagatactagttgtaaagaggcacaatggaaaacttatactattaacagtagtaaaaagaaacaacaaaaagcaataaaaaacaaaacacccattcatgcaacgacatgaacgaacctcacaaatattatactgagtaaaagaagtcagacaaatataaaacaaagtttatactacgtgattagatctttatgacattctagaatatgcacatgaaggtacaaggtaactgtctggaatgatgaaaatgtcctgtgtcttcaaaatagtgtgggttacactaatgcatggctttttcaaaactgatttaaagggacacaacatctgagcatttccctaggtgtaaattacactgcaattttaaagaatcatctaatgatattgtggttatttttaaacagtccttaaattttgtggatgcatactgaatgtttacagctgaaaagatatatataaagcttgaatttggtaaaaaaaaaaaaaaaagagggaggattggtagtgataaagtgagtggacttatggatgagacatgatcagccatgcattgaaaaaatgtaaaagttggatgatcttcacatgagagtcctttattctgtctacttttgcatatgtttgaatatttcccataacaaaaagttgaaaatagagtgatcacatgagttaatctcctaatttacaaaaaagaaaactggaaacagaaggagaacaaaacttgttcaaggtctcaaagccagacagcaaactagctcccaagtccaaccttcttgctctggtcctaagcaaacaaaaaatattaatatgagctactgcattaaggaaagtctgcttttccaaagggcagaccaatagttcaaggaagagtttaaataataaatatttgtgatcttactttcatgcttttctattttccactgaacacatatgcattatcttctatatgtcttttatgtataatcatttgcttcctgttccttgtggttttaaagttgttttgtatgtttaaatttgattttactcaaatttcagaacccaaattagcgcaagaatcagacaaagcataactttctataaatataaaaacaattaaaaaaaaaacatacagcaaaaacgagttgttgtttcccccctcctcttccagtgcttaactaatcttccgaatccaggcacagaaagcaaaggctttctgctagtgggaggagcttgcttctccattctggtgtgatccaggaacagctgtcttccagctctgaaagaggtgaaaatgtgttaagcgatgcaaaaattgtcttgaagttcgcgtgtgtatgtctgtgtgcatgtgcgtgtggtgggtggggggagagaaaagggggtgtcaattctgagggcaacgagaatcagaagtcagaaaggtgagtggtgtgtagcatctccctttcagaaggggctgaagaagaaattggatatgatggtccggtaggctaaatcacgctggatttgtctcccagataaagggaggtctgcaaagtaagtcccatttctagagcgaaaagccttaggaccgcttgttttagacggctggggaatatttattccttgttccactgatgggaaaatcagcgtctggcaggcgctgattggtggaaaggaaaatggtgatagtggcgtggaaagaggatttgctgagccttctcctgcctcctcaacctgtgactcttccttagtagtctccctttcaccctcaggaccctttccggctcttcctagattaagagcaaacgaaaaccttgaagatatttgaactaaagcgacccctaacgttgtaacctgtgaccgtgattaaatttcagcgatgcgagggcaaagcgctctcggcggtgcggtgtgagccacctcccggcgctgcctgtctcctccagcagctccccaagggataggctctgcccttggtggtcgaccctcaggccctcggctctcccagggcgactctgacgaggggtagggggtggtccccgggaggacccagaggaaaggcggggacaagaagggaggggaaggggaaagaggaagaggcatcatccctagcccaaccgctcccgatctccacaagagtgctcgtgaccctaaacttaacgtgaggcgcaaaagcgcccccactttcccgccttgcgcggccaggcaggcggctggagttgatggctcaccccgcgccccctgccccatccccatccgagatagggacgaggagcacgctgcagggaaagcagcgagcgccgggagaggggcgggcagaagcgctgacaaatcagcggtgggggcggagagccgaggagaaggagaaggaggaggactaggaggaggaggacggcgacgaccagaaggggcccaagagagggggcgagcgaccgagcgccgcgacgcggaagtgaggtgcgtgcgggctgcagcgcagaccccggcccggcccctccgagagcgtcctgggcgctccctcacgccttgccttcaagccttctgcctttccaccctcgtgagcggagaactgggagtggccattcgacgacaggttagcgggtttgcctcccactcccccagcctcgcgtcgccggctcacagcggcctcctctggggacagtcccccccgggtgccgcctccgcccttcctgtgcgctccttttccttcttctttcctattaaatattatttgggaattgtttaaattttttttttaaaaaaagagagaggcggggaggagtcggagttgtggagaagcagagggactcaggtaagtacctgtggatctaaacgggcgtctttggaaatcctggagaacgccggatgggagacgaatggtcgtgggcaccgggagggggtggtgctgccatgaggacccgctgggccaggtctctgggaggtgagtacttgtccctttggggagcctaaggaaagagacttgacctggctttcgtcctgcttctgatattcccttctccacaagggctgagagattaggctgcttctccgggatccgcttttccccgggaaacgcgaggatgctccatggagcgtgagcatccaacttttctctcacataaaatctgtctgcccgctctcttggtttttctctgtaaagtaagcaagctgcgtttggcaaataatgaaatggaagtgcaaggaggccaagtcaacaggtggtaacgggttaacaagtgctggcgcggggtccgctagggtggaggctgagaacgccccctcgggtggctggcgcggggttggagacggcccgcgagtgtgagcggcgcctgctcagggtagatagctgagggcgggggtggatgttggatggattagaaccatcacacttgggcctgctgtttgcctgagtttgaaccacaccccgagtgagcagttagttctgttgcctacgcctttccaccatcaacctgttagccttcttctgggattcatgttaaggatacccctgaccctaagcctccagcttccatgcttctaactcatactgttaccctttagaccccgggaatttaaaaaaggggttaatcttttcatgcaactccacttctgaaatgcagtaataacaactcagaggattcatcctaatccgtggttaggtggctagacttttactagccaagatggatgggagatgctaaatttttaatgccagagctaaaaatgtctgctttgtccaatggttaaatgagtgtacacttaaaagagtctcacactttggagggtttctcatgatttttcagtgttttttgtttatttttccccgaaagttctcattcaaagtgtattttatgttttccagtgtggtgtaaaggaattcattagccatggatgtattcatgaaaggactttcaaaggccaaggagggagttgtggctgctgctgagaaaaccaaacagggtgtggcagaagcagcaggaaagacaaaagagggtgttctctatgtaggtaggtaaaccccaaatgtcagtttggtgcttgttcatgagtgatgggttaggataatcaatactctaaatgctggtagttctctctcttgattcatttttgcatcattgcttgtcaaaaaggtggactgagtcagaggtatgtgtaggtaggtgaatgtgaacgtgtgtatttgagctaatagtaaaaaatgcgactgtttgcttttccagatttttaattttgccctaatatttatgactttttaaaaatgaatgtttctgtacctacataattctatttcagagaacagttttaaaaactcatagtcttttaaaaaataatcaagaatattcttaagaatcaaaatcattgatggatctgtgatttcttttaccatcatgaaaaatgtttgtcaattttaatccattctgatttttaaaatatgactttgatatgcccctgtgatgtgtataaagagacctatttgtggccctaaaatggaaagaacagattagtctttgatagagttacttcatgtgatcatttggtctctgtgaacactgaggacagagaaaagtgcttgagggctgctactaatctctcagaaacatttgtatagttcatccatcaaatgacacacatactaaaagaataaagaaattgatgcttattacctacttgttcctaaagttccaccttggggtatacacccaaactctgactctcttttctgtaacttgaactgtattcaattgagtgttattttacaaaccactttgaattccttggaaaagaatagacacacactctcatccacaggcatagacacacacactcaacacagacacattgcccattcttcctctcttctttctcctctgagctttttcacattctctggtggcaactatagcagtaagagtcacaggatgaacagtcaggtggaggatgaccacattgagttgcctagctgaaacatgtgctccgtctatgtctgcaaagtgaaagaaagctacactatctcttcaacatagatcagtgggggaaattttatacttgggatgatttatatgaatgcatctcatcaaagttcacaacacatttttttttcagttttttattttcagtttttagagtcagggccttgctctgtcgcccaggctggactgcagtgatgctatcatagctcactgcatccttgaattcctgggctcaagtcatgcccccacctcagcctcctgagtagccaggattataggcatgtgccactgcctcattatttagacttttcttatgttgacttaatcttcccacaaatcttcaattaaattactttttttctaccttaaaacatattttcagaaagtcattgaaatagggtgttacaagaggaaaaaattgatgagttaattttaaatattttatgaagtgtgaattatacctttttagatggaatttggaatactgaatcagtgacatgcagtttatcaatatctttccgtttgtcctcagatttccaagttctgcaagcacaagtttctttgacttagttaccttttaactgttcattgaaatcattttcaatgtctctcatggcatttaacacatagcacattctataaattttttattggttacattctgagttctaattgagagttgaacttacacacagaatttaagataaaaaatgaccatgtgaagacacaatagtatagtccagggattggcaaaattttgggtaaggaatcagatagcacgtattttaagccatgagatctatgtcttggccaggtgccgtggctcaggtctttaatcccagcactttgagagcccgaggctggtggatcacttgagcccaggggtttgagaccagcctgggccacatggtgaaaccctgtgtctacaaacaacgcaaaaattagccgggtatggtagcatgcatgtgtattgccagctacccaggaggctgaggtaggaggatggcttgagccatacagctcactgcagaggttgcagtgagctgagatcgagccactgcactccagcctgggtggcagagtgataccctgtctaaaaaaaagaaaaaaaaatctatgtctcaattctgctgttgaagtgtgaaggtagtcataaacaataactagtgtggctgtgtcccaataaaacttcatttatcaaaacaggtggtgggctggaattgtcttgtatgttgtagcttgctgactactgatagagtggaaagaacatgcactaatcacacaaaccaaagttttagttgagactacatcacttatcacctttagggtcttggggaagcgtacttaacatctctgagcatcacttccctgattagtaaaaaatatgatttagaaaactgcaactaccttgcagtttttgtgggaatgtcataataagacaggacatatgaataattgagcacacttttatatataggaaccatggttattattatcaaataaactctccaacggaataattactttgccaacacgttttccatttattcttttatccttcattacataactagtttgaaagattggaggcgaccaaagaccattttataatttcacttatggctgaagatgtttggtagaagcctcataagaaaagtaatctcattcctttataagaatatacttttaacaactactttttaactcattgaagaactaccttaatgatcagtgttatttttatgggttttgttccctccatttttgttatctgcgtacaccaattttcaatcaacatacttcaatttaatagacaaaaatttcttcaaatgactcagaaattaattagatctaaatccaaaagcagaaagatttaattatctttatataatgctcagtaatataaatgcaataaatacaagaaaatgatgatctttgagtgtcttccaatgccactctgctcaataagcagcagtggccatcagtgaaattgatagcaaattctcaagtcaaaatgtgcttcacctcactaagctgacaaagtcaacataacatgcacaacagggataactgagttctcaaaactctcaggtattacttctgaccttcttctccactctgtgctcttttgaggttgggaagacaagatagggtgtgtgtgggacacctccgctcagggaagccatcagctctggtgtccctacagcatttataccttgctagtcacataaccacttggcacctattttgtaggtgtacgttatcaattacagattactcataaattaaaggctaaccatcaattacagattattagtaaataattatgacctcaaagaacaactgattggtttgatacatggtaaccttatgaggactctcatttatctcgtttttttaagttatatacctatctctttggggttgcactacaaaaatataaaatatgttgcataagatatttataaaaaataattaattataagttctaatggtgtggtttagtggcattcttttttttttctttttttctgagatagggtctcaatctgtcatttcactccaggctgaagtgcagtggtgtgatctcggctcactgcaacctccgcctcctgggttcaagttattctcctgactcagcctcctgagtagctgaaattacaggcatgcaccaccatgcccggctaatttttgtatttttagtagagatggggtttcaccatgttagccaggatggtctcgaactcctgatctcatcatccccgacctcggcctcccaaaatgctgggattacaggcgtgagccattgcacccggcctagtggcattcttttttaaaaataaatttaattgtgtatatttagggtatgcaacatgatgctatcagatacattagacactaaaaaattactatattgaagcaaattaatatattcataatctctcatagttaccttttttgttgtttttgtggcaagggcagctaaaatccacttatttatcatgaatctcaaatatagtacaattttatcacctacagtcctcatacattagatctgtacactttttcatcttacacatctgctacttgcttggatcctatggcctatatgtccctattttctacctacttttccacccctattaaccctgttttttacgtagtctctgtatatttgaattttgtttcaagcttccacatatatgtgagataatgtaatatttttctttctgtgtttggcttatttcacttagcataattttgtctgggttcatccatgttgtaaatggtaggatcttgtttttttagggctgactgatattccattgtatctatgtaccacaatctttttatctacctatctatcagtagacactttagttgtggctattatgtttttctttttttcttttttggagacagggtcttgctgtcacccaggctgcaatggagtggtgttatcatagctcactgtaacctcaaacttctgggctcaagagatcctcctgccttggcctcccaagtagctgagactacaggcatacattaccatgcctggctaatttttaatattttttgtagatatagcatctcactctgttgcccagactggtctcaaactcctaattcaaatttagaatagagtatgacaattctgtaaaatataaaaaacatgtccactccgtataggaagttatacaatgagaagaagacaaacactatttacattactcttgataagttttttacaaagaaataaaacactttaatttctaatgttttaaattctggtttgctaaataaataaatattagttttagtgtttttaaaattccttatatagttataagtgatcttcctgcctcagcctcccaaagcactgggattccaagcaagagccactgtgttggggcccttggaaacagatatgctgaaatcttttcttgtggatctacacccagaagagggattgctgggtcatatgctactctatttttaatttttcttttatttttagtgaatatgtaataattgtatataattgtgggatccagaattatatttccatacatgtatacaatgtgtgataatcaaattagggtaattaacatatccattacctgaaacatttatcattcctttgtggtgggaacagtaaaaattaaaaattctctcttctagatttttgaacatatgcaataaactattgttaagtatatcaccctacagtactacagaatgctagaactcattcctcatatttggctccaatttcatattctttaaccaacctctccatatcctcccctccctcttaccgttgtcagcctctaataatcataattctactctctacttctatctcattgtctttgatttagaatatgtttcataatttaaccaaaggtcaaattcttaggtactgctaaggcaaagaacaaagatcgcattccagctgttagacatttcttactactagtcatttttaagacaacatggggtgcaggtggtgaggatgagagatagagattgaaacatattctcttaaatatcagctgttctcactctgcatagttccagcacaaacaaattccaggtactatggttagttaaataacaccagccactaacaacacaattcaaatttctgttaccacagtataccgaaagtcattgcataaagtacaaactttgctgctaactcttcagccttcaaatcattacataaataacagaaacccattataatcagtgacaaaaccacagcacttctttcaaagctttttggagattggttgcttcacatctgttatgcagttcatacagacagcaatgcccggacttgtgtggccacattgtctcccagtggtgagcccatgtgatgtttcacgaaaatgcgcaatcaaaagaggaaactggccagcaaagatgaaagagtagcaaacaaaggaagtgaaacattctggaagtaaaatttgaatcaaacataagttgatgtatacaggaagtagctaccctgaggatgttgtcactgctgcaattcaggagactctaaatatgcagtcagaggaacgtagtgaggtgaaggtatccgtataatggggaaagaggttgtgataaagagtgaaggtgtcccagaggaagtgttgctgaaaaatacaccttatgttaaatacactgtcagtatatcatgacattaaagtgcaaatgataacattttgtaaactgatccaaacttaaaaaggagtatgataattctgtaaaacataaaaatcatgccgattccataaattatacagtgtgaattacactgaaaaatccaacattagagaggatatgaatacaattttttacaagcataattttaataatacacataataattatttgtattcaagtttagtaatgttcaaggtttggaagaaattctgatcctgtgtagagaccctagtttgaatgtgcttatagcctattattacatgtgtaatgttacataaattacttaactcggatttttaatttcatcagctatttaaaatgggcataatataactatattaaatggctgttatgaagattaaataagatgatatgtaaaatgtgttttttgtttgtttgtttgtttgtctgtttgtttttttgagacagagtcttgctctgttacccaggctggagtgcagtggcacaatcttggctcactgcaagttctgcctcccgagttcatgccattctcctgcctcagcccctcccaagtagctgggactacaggcacccgccaccacgcctggctaattttttgtatttttggtagagatggggtttcaccatattagccaggatggtctcgatctcctgacctcgtgatctgcccacctcggcctcccaaattgctgggattacaggcatgagccactgcgcccagcctaaaatgttttttttacataatgggtgttcagcacatgttaaagccttctctccatccttcttcccttttgtttcatgggttgactgatctgtctctagtgctgtacttttaaagcttctacagttctgaattcaaaattatcttctcactgggccccggtgttatctcattcttttttctcctctgtaagttgacatgtgatgtgggaacaaaggggataaagtcattattttgtgctaaaatcgtaattggagaggacctcctgttagctgggctttcttctatttattgtggtggttactggagttccttcttctagttttaggatatatatatatatttttttctttccctgaagatataataatatatatacttctgaagattgagatttttaaattagttgtattgaaaactagctaatcagcaatttaaggctagcttgagacttatgtcttgaatttgtttttgtaggctccaaaaccaaggagggagtggtgcatggtgtggcaacaggtaagctccattgtgcttatatccaaagatgatatttaaagtatctagtgattagtgtggcccagtattcaagattcctatgaaattgtaaaacaatcactgagcattctaagaacatatcagtcttattgaaactgaattctttataaagtatttttaaataggtaaatattgattataaataaaaaatatacttgccaagaataatgagggctttgaattgataagctatgtttaatttatagtaagtgggcatttaaatattctgaccaaaaatgtattgacaaactgctgacaaaaataaaatgtgaatattgccataattttaaaaaaagtaaaatttctgttgattacagtaaaatattttgaccttaaattatgttgattacaatattcctttgataattcagagtgcatttcaggaaacacccttggacagtcagtaaaatgtttattgtatttatctttgtattgttatggtatagctatttgtacaaatattattgtgcaattattacatttctgattatattattcatttggcctaaatttaccgagaatttgaacaagtcaattaggtttacaatcaagaaatatcaaaaatgatgaaaaggatgataatcatcatcagatgttgaggaagatgaggatgagagtgccagaaatagagaaatcaaaggagaaccaaaatttaacaaattaaaagcccacagacttgctgtaattaagttttctgttgtaagtactccacgtttcctggcagatgtggtgaagcaaaagatataatcagaaatataatttatataatcggaaagcattaaacacaatagtgcctatacaaataaaatgttcctatcactgacttctaaaatggaaatgaggacaatgatatgggaatcttaatacagtgttgtggatatgactaaaaacacaggagtcagatcttcttggttcaacttcctgcttactccttaccagctgtgtgttttttgcaagattcttcacctctgtgtgatttagcttcctcatctataaaataattcagtgaattaatgtacacaaaacatctggaaaacaaaagcaaacaatatgtattttataagtgttacttatagttttatagtgaactttcttgtgcaacatttttacaactagtggagaaaaatatttctttaaatgaatacttttgatttaaaaatcagagtgtaaaaataaaacagactcctttgaaactagttctgttagaagttaattgtgcacctttaatgggctctgttgcaatccaacagagaagtagttaagtaagtggactatgatgccttctagggacctcctataaatatgatattgtgaagcatgattataataagaactagataacagacaggtggagactccactatctgaagacggtcaacctagatgaatggtgttccatttagtagttgaggaagaacccatgaggtttagaaagcagacaagcatgtggcaagttctggagtcagtggtaaaaattaaagaacccaactattactgtcacctgatgatctaatggagactgtggagatgggctgcatttttttagtcttttccagaatgccaaaatgtaaacacatatctgtgtgtgtgtgtgtgtgtgtgtgtgtgtgcgtgtgtgtgagagagagagagagactgaagtttgtacaattagacattttataaaatgttttctgaaggacagtggctcacaatcttaagtttctaacattgtacaatgttgggagactttgtatactttattttctctttagcgtattaaggaatctgagatgtcctacagtaaagaaatttgcattacatagttaaaatcagggttattcaaactttttgattattgaaaactttcttcattagttactagggttgaatgaaactagtgttccacagaaaactatgggaaatgttgctaggcagtaaggacatggtgatttcagcatgtgcaatatttacagcgattgcacccatggaccaccctggcagtagtgaaataaccaaaaatgctgtcataactagtatggctatgagaaacacattgggataaatcggctgctatcataatcattcctctcccacatcagataaatgaattaactttttgaatagggttatttaatataaagtgcttaagtctaattatgagaagaaataagataattacacttcaatggttaaagagagggagaataatttgcatattatgcctgatgtaaaatgtttattatgggtacatattaagtgctaactaattgttaattgttcttgctacaagtcttaatgcagggaaacaagaaattattacatagtacctaatattatcttctaatattaaagaaacaatttcccctaaattcatcccattagctttttttttttcggtggggcaggggagaaatacagacttcagtaaacttgggctgggaactttctacctacaaagttcaaataaaataaattatcctagttagataatatcaatgaaaaatccaccaacttaaatcctggctgtttgatctcaggaaattatttcagttatcaacttaatgcatcatattatagaaatatatgaaaatgtgtttaattaaacttactgaatgatatgttttttcaggtactttaaaaataaactatgatataaagttacctatttttcatgcaagtatagtataaagaaatttctaacactggagattttctgaaggttttgattcttataaatttattacatcataatgaacaaaactaattttcaacatattatgatttaaatttccttagtaaattgtttcaaatttattttctttaaatccatatttacatatgtatatttaaatatacatatttacttgtataacaattcaaaaccatatattaattttataattttgtttaatgtcaaaggttagatttggctatatctattctaaaagttggtatcacatttcctttttggaattttatttttaaagtagctaaagtcaaatataaacctattatttatattaatgcagacattagaggtagacactaaattcattttagtatattctaaattatttattatctactatgaaataatataaagaaaaataaagcagaatccctgatttcaaagaactcaattgccgaaaaacagttaccatttattagacccaaaatgtactaatatgagtgtgtctcttttccttttgttttgtcacccgtcatttggaatgtcagtgagtagagagatagtgtgaaaggccctcaaggggaaaaatagaggttaaaggtcagcagagaccctactagagaaatcagttctacagaaatgtttttaaatgtgtcgattattgctacatgtacactctgtcattttgtaatgtagccattttatttatgattataataataaaacaacaaaattataataatgtgtagagtacattttactgtgcagtgtattgcattaaaactagattaaaatttatacatatataaaaggctatctagatattataaaatttatggctggatctgtaaaaaattcaaaacctatttttaatctcgctttgagattttataacaagaaaatgttcgtttcaagcaaaattttcaattcacgtccttgaaaaggaaaaaaatgacaacttgaaacacataattgactatttttaaaggatcaacatttcagaaatgttttaaaacataagattttcagtacagcttttcgctggcatttaaatcgaactttgaattgtaaatagctcttgctcttaaggagacatcagccatatccttagaagtggcacggagttgttaggtagttgtacaaaattctagcctaaaagacaaatagggagcaacactactgtggaccgtttctggtcttgggctgtgtggctatgtcaggcttgcccacattgcctgtactaaggagaaagcctcttgtccttacagacccccttagcttacatagtctatttgaaaacaaattgctttgtccacaccatttaaatattggcttcaggccaggcgcggtggctcacgcctgttatcccagcactttgggaggctgaggcgggcagatcacgaggtcaggagatcgagaccatcctggctaacacggtgaaaccctgtctctactaaaaatataaaaaaattagccgggtgtggtggcgcgcacctgtagtcccagctgctggggaggctgaggcaggagaatggcctgaacccgggagtcggagtttgcagtgagccgacatcgtgccactgcactccagcctgggtgacagagcaagactccgtctcaaaataaataaataaataaataaataagtaaatattggcttcttcaactggtgagatgaaacctatacaatagtcatgtgaatagcactaaacagctgacatggtgtaactcctctcagactgaggcttatctggggagtacaaagcatgtcaagaaaatgtgccttcatttccttagatgagtgtccccatcctccactctcctccactgttctcctctctgcttctatgatatcaacttttctttttctttagattccacatgagtgagatcatgtggttgtttgcctttctgtttctggcttatttaactgaacaagaaagtttttgacatgaaattaaacttctgcttgtaaactcaattcaaactatttacactgtcttctcaaaaatgttaacttattttaataaatctactgaatgaccgtatctcattttgttttatgaaaagaaattgtaagggtgctcaatagcctcttcattttcatactgtctagctcctgtgctcctattaaaattactgcaaatttagctttttaagaaccctttgtttcactacctgaagttctataaaaagatccaagttccttcacaaccgtttcttatgctgttattcgtacatatgtgataataccacgtctgaacacgtagataataagtaggggctgggtgcggtggatcatgcctataatcctagcactttgggaggctaaggcgggtggatcacctgaggttaggagttcgagaccggcctggccaacatgatgaaaccctgtttctactaaaaatacaaataataataataataataattagccaggtgtggttgtgggcacctgtaatcccagctactcgggagactgaggcaggagaatagcttgaactcaggaggcggaggttgctgtgagctgagattgtgccattgcattccagcctgaacaacaagaatgaaactccatctcaaataaataaataaatagaagtatgtattgtgttgcttagaaggtgtggtggaaattaacttgctgagtgagatcaaaggattggcactgaattgaaataaagaaatattcatgctgagtctggttcaaatataactgcacctgtaagaattgctttctgtaaactttccatagtataaaccaaatccaaatcactcatggctttacattcctgatcgttaaacttgaagcactttttaatactgcatgactttagccaaaatatcttagccaagattcaatgtttggttgaaccacactcacttggacatcttggtggcttttgtttcttctgaccactcagttatctatggcatgtgtagatacaggtgtatggaagccgatggctagtggaagtggaatgattttaagtcactgttattctaccaccctttaatctgttgttgctctttatttgtaccagtggctgagaagaccaaagagcaagtgacaaatgttggaggagcagtggtgacgggtgtgacagcagtagcccagaagacagtggagggagcagggagcattgcagcagccactggctttgtcaaaaaggaccagttgggcaaggtatggctgtgtacgttttgtgttacatttataagctggtgagattacggttcattttcatgtgaggcctggaggcaggagcaagatacttactgtggggaacggctacctgaccctccccttgtgaaaaagtgctacctttatattggtcttgcttgtttcaggcattaacccagataaatgccatgcaaattttataattattatgattgtttcaatttctggaagaaagttaatgaaacaaaaaatgtagtaaaatgccaaaggaacagtgacatttcagaaagaatgagggctttcatgttaattgtaagtcttggaatttctcttccttggagtaacaaatccctttgtgcctaatttcctaatttccaaaataaagttcttttacttatttctttatagtgacatcatctcttattaaatggcatatctgcatattacataacagttcattgccaaatacatatttgtgggaaatgagagacttaaaatacataccaaccagagatatagttttgaggtagattttaaaattctgagaagaattttgactgaatttttttgacaaacatgggacacgaataagattataccaaagatattataactttcattttaaatatggaactaatacagtatgaggtgtcaacaacgttgaagtttcacaaacatcaccactacaacagcaaaataatttttgctttttccctgccacaatgacctccttgctatttcttgaataaatcaagcatacccttgccctgacacgttcttggggaggcctgccctaatctatataaaattggagccattcttctcacctctggtattcccagtctccctactttttttccttctttctttctttttctttttctttctttctttccttctttctctctttcctttctttcttttcccttccttccttcctttctcccttccttccttcctccctctctccctcccttccttcctccctttctttctttctcttttttctttcttgcttccttccttccttctttccttttctttctttttcctttctttgccaaagtgttattcacctttaaatataatacataatgtgcttactttaatgtatgatttttattttatttctcccttctagaatgtaggcaccatgagagtgaaatatatttattttgttcattgatatttcacaagtgtctgggagagtttccaacttacagtagacaattaacaaacatttattaaattaaggagggaaggaagtgagtaagcacaacaactttcatttctgggtcttttataatcatatgcttagtataagaacagtgctattcagctatccaaaagttacaatcaaaatgattttggatgaatatcttgaaaattgtgagaaagaagttttatttgctggcaaactattctgggttgtttccacttcatgtaatcctaagtagcagccttaccttgatagcccattaaaactctgataataaaaaggcagaacaaaaatatctgtgatatatttagatttactacatgtacttacatgtctagtgtctggtgcaatggatgctaatgatggcaaatccttactgggcttctagtgaagttcttcagctaatgtttgaatgcatggttggtcatggtggtacccctttgtacaaaatatgcttttcaaataatcttattagggataataattatattaattcctggtttccatctaaaattttaattctatttatagcttcgtaagatttcacaagttaagagggacctcagattaaattagtacacaggcaattaatcagttttgtgtctccgacccttttcacgggctaatagaagctatagaccctcttagcttcagaaaaatgcgcactcacatacgcacatcaaagagcttaatgggaagtccattgacagaccctctgttcagatcaatcttctgattgtagagatgaggaaacagaaatctacagaggaagtgggtagtccaagattgcacagtcatttggaatagactggacaccagtagtacttttccagccactatatcacttccccaagcacttcctcaaaacttaccttcctttgggtctttatacattcagttatggacaactagatttaactagaggattttattgcttcagaatattaagcaacagggaaacatgtaccgtcttttattcacctgcatttaaggcatacaatataaattgcaaatggagcatgaaagtgcttaatcttttacaaaactgggtttgctttccacccatctaaaaatacttctatttattttaatatttaaagcagaaatctaagtgatgtgacaaaattaatcatttggagatatttcccttataggtagtatagtttcttactgatttctaatatgaaaatgaagccatagaacctagaaattgcagcatagttgtggaaataaacattggactgagagtgaaaatggctagtcttcctctctgctcatacaccacctgactggataacctttcgcagatctcctaaaagtctttctcataaaatgaggaagctctactagaaaattgttgaagtctaatttagcaataaagttctgagtttctataataattcaaagaatactctaataaatgtctgcaattgtggtcacatctatgggatgctaaaaaatctggatggtttcaatgaaagtatttaatttgttcattatgaactttgaaataatttatttcattttttaaactttgatcaaaatgaccctggtaaatagaaataagcaaactctttttgcttgaaatgcttattaatgactgcattgagacactcattcatcattcaagaaagaatgtttgctcacactgtgccagaaacttggaggaagagggatgtgacaagtaggggtactggatgtctagcttgtagaagtggattaatggctctgcttttaagatcaggaacactgaaagggagtaatggcaccggttttcacctttcatgccctttgagggtatctggtccatcaccctctagttgatgagggagggaaagttccctctcccttcacaaataggtggaaattaaatgacataattctgaacaaccaataaatcgagagtaaatcaaagcagatacctgttttgttaatttgatcatatgaatgtagctgcccttagtaataatttctaagtataagactagttaaaggacaaatgagttatcttgaattataagattttgttttacagaacaatattaactcttgtgtttagtacattagaataatagatcttttgatccatatttttactcatgtgcacataagaagttatcagtcatacaattcatttcttgaagttcatacctttcattggcagagtagaaacaggttaaaagtgcacaggcagaaattttaagtgcaaagcaacagtgatgttatatagagaaaatttatatttcctacttctattgaagaagaaagatctgcttgttctaagaatattgtacaaagaaagtgacttgaatcagcgttattctgtaatgctactatgcgtgcagtgtggagtagccactagaacacttggtctatcccagctcctcaacagtgtcttgcttgtggctggtgctcaaataaatccttgctgaactaatgagcatctctttcatgccacatggaatgctctaaaagagttggatcctgaagtttttatatttttgtaattttctggagttttagagagcaaaagtcctgaataaactgtgaagccactgcctgacaaataatacagcagtcagcttcgttatcatatcccattgagacacgacttatctacatgatgattaatagttttcacgcaagaaataagcttgaaatgtctgttgccttggatacttaaaacatccaggttcagcgatgttatttattgttgttcaaaatcagaatgaagttcctaagcaatgccattttggaaaaattacatcaatatattatgaacaactttttttaaatcttgatttcaaatggattgacacgtgtatattctgtaataatcctgacttaattcataaaaggatagctagccagttgtgtgctagatgaataaaaaaaaagcaggttttaaaatgtcaggtttgacattgtgaatataatatctaagtatccttttactcatttcctttgacttactatggctgtcatgttgggcttcatgaaaatttatttttaaacacttgagtgttatggaccctctgattaaatgattaatcagatgatgtatgttgccatcagctgaatcatttaatgttgatttcacaaacaagcacaggtcacaggcaacatttcagatttctttgaagaagcacacacaggtcacaggcataatcttaaaataattttataacaaggtagtaataagagatgtcaggactggagaaatattttaatttatagtaagctttccccttaagtgtctaataattgttaatataatacattgcctcaaataattaaaagtttggttcttgtccttgtgcttgacttcagaagataaccagatgactattaggtatatttagacctaaattaaaagctttgagacacaatgaattgcctgatttgtatttgtgtttcgagtggcatatactattactggcactataatcttagattaaagcatactgtgattattaaagaaaaatttaagattgatttgtttctaaaggtatgtaacagtgacattttgcaatgtggtatgtaaaagttggtatttctcactcatatgagagcccactaatggtacataaactgtccccacttagaaacacaattattatggcctttctttgtatctgacaaaatttcactgggttcaagatggatgaatagtgaattctaatgacccttaatcctgtaaggttctaggtgggaaagtactctgtaattatgtataaaattataaggaaaataggcttactgctatgttttcattaaaaatcattaactgagtacttaatatgtgccagacactcagctgggcaccatgagaaatacaaaactgagtaacatatgggtggctcctgccttcaagaaatgggcagttcaggccgggagactgacatatttaccctgggaaaaagggagcagctgtggtctctgagaacaatatggtttgttacaagtatatatccatcatggaaaaaaagagatttatcttagaaatgagagaggctgatgctctcaataaatatcatacattaaattgtgtttttgtcagtagactgaaattacctcacatacacgcacagatagtagccatgatattttagctgcttagatatagagacaaatacttccacccaaatcttaggatcagtggttaatagtctgtaagcattacaatcccacaacatatgcatgactatacatccaattttaatattcaaagaactgattgcgatgatagttttgtttgtcaaagaaatgtattataggatgagtgggatagaactgcatcacgttacaccaacaaataggtttaaatcatatttgtgcacttcccttgttccttcataaatgtttaacatagcttaaaattctgtggactgcaacgtgagagcaatgaccacacttctgtgaacccatttttactgtgcatgtgctaacgtctattgttagtattccttcacttgcaaagatggcatgataattttgctggtttcattaatgagatactgttaaatgtaggatgacttcaaacttagttgtattgtaaaattatttttaattgtatacatttaagttgtacagcatgatgttttgagatacttatctttatttatatatatatataatatacacacgtatataaaagtgattcctacattgaagcaaattaacatacccatcatcatatggttatctttgcttttttactatcagtgcctaaaatctactttcttgaaaaattaccagtatgcactacaatattattaacaataatcttcatgttgtacattagatctttagacttactcatcttacatgacttaggtttgtttttacctctactaccatctgagccatatttccactttgtaatttgataataaacttggaaaaatagcacttatatgtttaggtgacgggcataaataggataagatgtgtttatatattattccatatatcttgtctccaactacaatgataaacaacctgtttgtccctaaaaagtaagaaataacttgacttttctgccccttcaagcataggctgttagcttttaagttttagggagacattgatgatgctatttgctttatcaagaggaaattgtcaaaagaggtcttttggttctcaaactattcaaagtatttaaaaatcaggacaaaatatgtttacgtgatattcaagggtacagaaatgaggtaaatgagatgccaattgtatttgtcatgcaaatatataattacgtgtatgagagttagatgatacatctcatcaatttaattgttcttctacaaggagaaaatgaacaatttgtcaactcgtatatgaagtaatttttataagaaattttattaaaacttttaacaacatttggatttttaagttgcaatttaaatatccccttctaccaggtgattctggaatcactaagcagttacttgtgaaaattccaaagtagcatttaattcttattaatgtcatagtgaatactaatgcaaagaatactgagccagaaattatgcttgttgaataaatagattatttattgaacaagtaagtgaaaaaatggaaataaagaacggatatatattttatcttcctgcttagatgtgggactgtcctacttttctctggtgttcacaacaacaatatgataaatctaattggaattcagttcataggaatgaattcagttacattatggattgtgatgaataatgtacacttttaatttaatgaaatcaaatagattttaactatctatgcttacaatggggtgacataagtctgacaatccttaatatcaagtcatctccaattcacatgtatacacactttttttctatttggctattgggaatcctcacaaaaatcgaaaattgccctttcagtgtacgttacggtatttcatgccacacagattttctgaggttgtacatacagctttgccttgaggttccaatttttgctcagtggattgagtatatattatttgctatatatcagaagaggcatgtgcttcctacttatgtcaggtaactttgggattaatataattgtcctacaaagcatagatagatagaaatacttcatccttaatttctaatattatgacatatctaaagtaggcacctttaaaagttaatctccactaaatactaatgactgcttatagtggcaattcatctttcatggtagtcctcctacaaaggtatactaacatttatgagtttgaaacaaaggcaattcacaagtgttctgctagagatggtctatatctgctgtttgatccagcatgatggccagctggccctcctgtgcatgacggctcgtggtttaactgcaccattttgtttggtcatatacagggaaaacatggcatggtgtggagggcatgggcttgaattcagggaacagagagttggtcttctctctctcactctactggatgatgtcatctcccctctctaagcatgagttttcttatctgtgaaataaaaatgttgaattaaatgagttcaaaatgctttcagtctgtgtttaatagcttgaatcttaagacaatgtattcaattatgcgttgccagatccctggcaactcatgtaacctttctaaaccatagctactcatctgtaactggccagccaactgcccagggttggagtgtgaatgaaataagataatgcagacaaaagatttttaaaaattgtagtgcattatacagttgtaatattttgccaagaacttacattttctctaagaagtgtgtcgatacatgatcacagaaaatcttttccatattcctttgtagtttgatgatattaagtaagtaaattgtataacacaaagagggaaaagcatcactgaacatgccgttttatttagctaaataaaatgtaatcactattagttttcctctgatttccccaaagtcatgtgattccattgagtattatgcacatggtataattagaatggattctctgctcaaataattttgggaaacatttaaattaacaaagtttaaaagtatctctgttaagctgaagcaaatctcaaaggccttaatattgtatgtaagaggaatagttaccatctttcctaatgcctctttgacgccaaacccatggagaatagttctaggtgttcagtaaaacacagatttgggatgccacaggttaattggaactgtcccctgcaatccttttctctttttcttaataatggctgattgcaggtcctagatgaaagacatttagagagattatcaggactcagcatcccatatcagaatccattcttttatagtcattttctgttacatttcttgggacaacaccaaagaaatgaccatcttcattcacataggctttgtaccaaatgctgacaaagatccttggtgacctagatgggggcaggtctaagtagattgcagctgtaaaattggctgatgaatgatctcagccccttttactcacactcaaaggcaggacagtccattaaggggaaggagggcagagtttttccttaggccaattccctatgccagaactttttagaatggaagcatttccagaggagaaacaaccccaagcacagttcaaagccccctcctcccaagttcatttgaaagtgggatggtttatctgcaaagggggaaaagatgagggatagggacgggaatatccctacccttcagagagtctggtttcatcctgcacttttactgcacagccacaaatgccttggggtgaatctacaatatgatacatcatatggtctaaacgtgcctggctgatcctctctaatacttcaggggtctaaaagggataacatgctctcctgttactcaccgactctgtccgccatatttcacccagccagccactgccttcacttccgtccgaggcctaatctgagcccatgggaaacctaagaacccctaccacaactgcctcaactcttgggaatcagggtgtatgggggtgacaggaagtgagcatacattctccaacttgatatgtcagcccccacgtctgtatgaatgtttgctcacactgtgactgccggccttgctcctcaggctgcatcctaccagggagtaagacccaagtccttcctgctttcagacaacaccaagcctcatgagtccccactcagaggaaggaccagagacaaactctaatgttccactaatacttcccttcttattactttccttgaaaatcccttctccctctttctttttatacttcgctaatgaaaggtaatgaaagggtctggcacttggaatttagaattgatacatggtttttaacccgcggacgtattccacaataacccttgcatcttctactaagatgtgggctaggaagggaccagccagttcccagggtcacagtgcctcagctgatgtttcatattttcagcaactttatgttagagatgtccatcaatcagaacaatatggttagagaataaactaataaaagtcatttttgaggacatgttggaagtctatcaaaagcattgaaattatgcatgctctgaccagtcgcatgtctaagaatttaaatatgatcataagtttaaatatgaagatgtttatcacagaattgattataaaacaaaattgaaaaaaatagtgctagaagtttgatcatagggacctcattaaatgcattatggttgatccatgcagtggtttgctgaacagccattaaaatgttgtagaataattattaatggtgtggaaggatgctattgttgcagtatgtgaaaagaacaaattacaaagcagtttgtgcagcataatatttttattttttaaaaacctgtatgtggcttatgtacatataaagacgtggaataaatgcacaaggtactcagtttttctcagtgaagcccattttgcattttgggctgggtaattcttcgctgtggagaactctcattcattgtaggatgtttacaagccctgggccttacctctttaacgccagtaggcacccccagcatggcaacaagcacaaaatggtctctctcatattgcccttgaggaaattttgcaactaagtaactattactgggtcctagattacagtctggattattgcgttcctttcttatttttattttctccaattccctttaataagcatgtactggattcataaaaaaacaacataaatggtaattacaatattccgcactggttaaaacttatgtaaataagcattctgctgctttagccacaattgcaatttatgctccttctctttcttaagttcccagttcccacgtacattcattcgactgattcaaaagtcattttagcttgatagactcttaaaagttagagttatcatttctgctatttattctttcaattatccatttgtccacccatccatctgatccattttgttgatgcatgctgtgtataaaatactacaccagcctggtgcggtggctcacgcctgtaattccaggactttgggaggccaaggcgggtggatcacctgaagtcaggtgtttgagaccagcctggccaacgtggaaaaaccctgtctctactaaaaatacaaaaattagccaggcatggtggcagacgactctaatcccagctacttaggaggctgaaccaggagaatcgctcgaacccaggagatggagtttgcagtgagctgagatcatgccaatacactccagcctgggtgacagagcaagactccgtctcaaaaacaaacaaaaaaaatacaatgccaagcatcataaaaaatatagtgatatataagacctatttgttgtgctctaggcattgacatctagctgtcaaccattaatatgtgtaggagtctatctatcaatattatggactgtgcttgaagacttcttccccaatctttttctcttcccattaagtttgaagtgaggttttctgagtgaagtatcatagtacatacagtctcattatttttcaaaaatctctggttatagtacatttctttcctttatcccctttgttcccaactatcaaaccattttggatatccagtattggtatccagtattattaaaaagcaaaacagagaactattaacaaaaaaatttgtaggagtaattggttgtatggtatccagtactattagatagtaaatcagaaaattattaacaaaaattttagacgaataatggattgtcttgcccaagtgaattgagtgatttagttgttctttcatttttagcaagtacagctgatcatttgaggccttactcattgtttgattttgcaaattcttactattataaatgttttgggctctgagaaagctgttgtcttaatctgtttgtgctgttataacaaaatacatgagactgggtaatttacaaacaacagaaatttatttctcatagctctggaggctgggaactccaagatcaaggcatttgtcttcaggttcagtatctggcgagggccggttctctactcccaagatggtgtcttgtcactgtatcctccagagggccaaatgctgtgttctcacatggtagagagatagaaagggccaactcactccctcaaggcctttcataatgttaccaattccacttgtcagggctctgcccccgtgactttattacctctgcaaggccccaccacttaatactatcacgttggttattacgatttatcacatgaatttcgaccatactagttgccatcctttcattttcatatatccttaaaactttgcctttctcattttaatgtactttatccacagtatgccaacttttcgatacttttgttaacctgtctgacgatatataggaaactgtaaaagtgcagtttttgatacactctttagctgcccgtttacttctactgtcgttagagaaccccatccatagtgcatgtgtttattttgtgtatgaacaaagactttatatatagtttgggtcatttttattcattagtgcttcccttataatctctgaataccattttattagtacatactgctattcttaatagtaactagcatgcctgatcatcccaaatgtctaggttcacattttaaaataagttatatctttgggcttaacagtttattgaaaggtaacaaggattgagtcatagttgtatgtttttggaagtagaattcaactgtaaatagaaattggttgtttagatctcactatatatgaaaaaatgaaggctttaggagaaaatctccccaaagtacccatttttcatgtgataaatatcatgaaatgatttgagaaaaaaatgtatatttgttacagctaacaaatatttgtgttttttattcttcatggagagaatgaaatttcttctcttctttacacatttctttttcttattagaaactaattggtgcctttataaaaattaactgcagagcactaacgtgtatatataagtattatgtagggtgtagggtatgttcagggtatggtgtgtgtgtgtgtgtgtgtgtgtgtgtgtgtgtgtagctgtgtgtgtatataatgaaatatatggtagtgttgtttcagaaatctgcttggtcttcccagagttcattcatcttataaattcatctacattgatctctatttttggaatccatgaaatgttttttggcagtacttcctttaatatagtgtgctggaaatctggaaatttctagccagattagttacaaaaaattagccagtggttttgcactctctatagaatcaaggcccaaggcctactcttgttactcagggccttgttttatctggcctctttcttttcagccatatagctctcaaatactcaacaaaattcttcattctaggtagacaagtatcttcaaaatacttcccaattatctaataactgtcttaccactaagaaggcttttatgtctcctgtctgaattttatccatgcaaaaaagtccagcccaagcctccagaactccaaaaagttatccctaactgctgaaacacagtaatttcactatgtgaaatttcactttggtctcctagcatttgcagatataccatacatatccttgatccttttcctttcataccttttatatctaacccttaagctaataattttacctacactgtaattcaaaatgtatccccagtcttaccatgtctcccttctctactgttaccaccctaggctaggccttcatcatttctcacctggactccttccctaacctctgaactgatctgcctgcttccacttagacacccaacctagtccattcttgagcagtcggaataattcttttaagaaagaaaccagatcacatccccctctgctcccaaccatccagtgacctcttatcatacatagaatgaaatgcaaatctttactgtgttttaaaggccctacattatctggacctcagtaacttcttacttcctatcccttttctccttgtatgccaccctccaactacactctaactacactgtctttttccctgttcttcagacctgccaaccatattttcactgctcaattaatatgtagaaaatgaattgtttgttaaatgtagactgtttccttcttaaagcaaagataaatgacattgtcttcaaaaacaactaactgcccagaattcctgattttaattttaaaaagacaaactgcaagaatgtgttaaacagtaaggaaacaattcactacttcagaattctatatgatttcactgcacgttagtaattttgtatattatagaatatgagggtattctaataaacttaactctatgctgtatacttatcatgatagctcattttcttatatgtttataacagcactacttattgtacatggatacgtgggaaataaattaattttctccttaagaacaaagcaaccatttcactcatgagataaatcttgaagatttaaaaactacttataattaattatacattattcatataatgttaagtattttcttagtaaaccacataatttagaatggcaattggacagatgggcagaaccacatgcatccactattaggcagttggtgagcataagatgccagaaagaagattaggaatatcaaggcagggagcttccgatcgctcttgaaaacattgacccttcactcctcactctccacgatgcatttcctttgaaaagtaatgccttccaaaacaaagttctctgttttatatctaaacttactcaatagtttctcatggttattgatatataaaaaataaagtaaaatgtttaggcagaccaaaagaagaatttccccctccctctgccttttatgccaaggtgacagctatgaaatgtacagtacgtttcctctgcaaggaatgtagcagtgttccattgcaagaagatgagagggagagaaaggttgcacgctgaggaatatagtgtcatttgtcactgcctagactcatcagctgtgtggaactctgagaggcaccaggcttctttatttatttcttcagaaacttcagcaaaaaagatttcattaggagcagagaaaaatgtgaaaaacgaattagcttttgtgatggggagtagtcatctctgaatattgatcaagattaagagggttgtcttcgtaacttcttttatccatagtctatactgatttaactagaaaactaatttcaggtggtatttcgggtgtggcagatctttatagtaaatgaagaatctagtcaaatctactgaaaaactctgcttactttaatgtttgatctggttgaaaccattttagcttaacaatccttcctctgaaacagggaatcaattgatatcctacagcaaaattatgtggaagggccattagcttcacatccaatgcaaattttgcctgtgtttactcttccccaatccaaaatatatcagatcctagatgccagtgaaatcgtttgagctagatggcttgagggtcatagcttttttcatttcctgttctcagacctcttataattgatagaataaaatcagaagagccctagagctgtcccacctattctgcctcacaaaagtagaagtaatggcaaccactatcatagggatcatgctcacctttttcttaccagacaaatttggatattagcttgaaattaataccttccttaaaatgttggaatttggttatatgcgaaattttgctctatttattcattatattttgtatggaattatttttgccctatattttcacttaagtgttctctacccaagattttaattgaacccaaatcagccagacacacagacatggattttgctgccaccaaggttaattcttcttttaaagttaacttttaaaatttggtaaaatatagctttgaaaatttgcattcgtctagtgtttgttatgtatttcccccttttgtttgattatatgtctatatttttcttgtagaaattgatttttaacctgctttttatgttagcttttatgagcttctgtctgaattctgaatatgtctttcttaatgtcttctaaatgtttctttctggattattaaaagatttattaggcttttaataattatatttgttaccttagggaatgtgtttgaaaatattttaaatggaattgccagttaacacagcattgaactttttcttgttagagatacattgttttctaggcattttattgggagagaagttagtatgatataatgtctttggctgatattaactcttctaagatgcattgtttctgagaacaccattgtctgatttcattcagggaaatttcacacaagccagtagagtcaatacttttttcaagacctgttaattgatatatataaaaacttgccattgtttacatgcccatttcagatcctttatgtgacctaagctagaaatgcattttaacagcatttgtttttccaaaaatatttatttatttatttattatagagatagcgtctctctatgttgcccaggctggcctcgaactcctgggctcaagcaattctcctgcctcggcctcccaacagtgctgggatacaggtgtgagccattgtgccaggcccttgtttttattttttttgaacattgtattttgaaaggggtttgaaggtgatccctagatagcaaccagtaatgattcgagcagcaaaacaatctaaaaagtaattttataagaaaatgcagaacataaatgagcccataaaaaattatattaggttctatttacattactaccttctttcacatgtaatatttcactaacatttaatgaatttctgtgcagtgccatataccattatgaattctaggatagaagaatgagtgagaaatgttcttaggccttaggaagaaggaacaagcatctctgtgtaatagttatttcaactcttcttttacacctcattcccatattaaatctcagaaaagctaaagtaatagctatcccagatctattttagactccagacacttacttcaatgtcttgttctccttatcagactggaatcattccaaacctcttaacttctgggcaaccatgataatgcgacagaaaggacactaaatctgtcgcaaatttatcttgatattctatccagtcttacttggtactgaaggtcacaagtaaaataaggtggttgttttttgtttgtttttttttttttgacagaagagaaaagaacactgtgagcacagagtgaatgtctaacattgattcttgagtagcaggaattctctatgcgagaggatctctatgcaaaaagatctcatattctagcacaatttaaggatctctatgcaaagatatcccatattttagcattatcaataagctatggggtaatatattgtatgtggtgtggcttgaattctagaaatttgatttctagaaatggtccctgtagttaaggatatataatgtggccgtctccagttttctatgaggaataggaaaatactatcattattagctgtgtgaccatggacaacttgcttcgttcttcagttgcatcatctgtataaaataagaataagaaaatttacatctgcaaggtgtgatggagatcacatgggataattgtggtcccagagcctggcacaaaagggcttaatatttataatcctccccatttctccgtatactctaaaggaagtttattgcttatcaaattgtgccgtggttagttgtacagcttccctgccaaattgtaaactccaacactaatgtgacgttacattttatatagtgctatgattttcaaattgtttgcataatttcaaatacacagtaaattgctttttattagtataattattgctattgtcaatattattattacaacagcttcacagtaagatgggcagaaaaaaatttaatttccattttacaaatgcacttttgaggctcacagaagtcaaatagaccaaagtcacagggctagtgagggacccagaagaaacaaattgtaattcactgattccaagttcagtggttgccttactgcatcataaaggctattacacaatccaggtgtatcatatgattcttgtctatatattcatacatatcagaaaaagtgttctactcaaaattgctagcaatcaacagatactgatagtcattagtacttaaatctttatcaaatgaaatattaatacccatgaaagagaggacaatgaaaggtttgtatcatttgtatgtcacaagtcaacttttttcaatcactcattattagtttaactgtaaaaaattatttacatttagcgtgaaactttcctgtattctcaacatatttccttcggtagaaaagcaaacctccagttctctgttctttgcttggatacttgccagtttgtaactcagctatcaaacagtaaagctcacaaaacacttattaaaatgactaaaatccaaaacaccaagagcacagcatgctggtgagatgtggagcaacaagaactttcattcattcactaatgctggcaatacaaaatggtacagtaactttggaagataggttgacaatttcttacgaagctaaactatacttaacatatatatttgtccattttcacagtgctaaaaagaagttcccgagactgggaaatttataaaggaaagaggtttatttaattgactcacagctcagcatggctgaggaggcctcagaaagcttataatcatggtggaaggagaaggggaagcaaggcacctacttcacaaggtgacaggaaggagaatgaatgcaggaggaactaccaaacacataaaaccattagctctcgtgagaactcactcgctatcatgagaacagcatgggggaaacagctctcatgatctagttacctccacctggtctctcccttgacatgtggggattatggggattataattcaagatgagatttgggtggggacacaaagcctaaccatatcaccatatgatccaaaatcatgctacatgatattcacccaaaggaaatgtaaactgtgtccacaccaaaacctgcacatgcacgtttatagcagctttattcataattgccaaaacttggaagcaaccaagatgttcctcaataggtgaatgaacaaaaagactggcacatgtactcaatggaatattattcagtgataaaaagaaatgagctatcaagccacaaaaacacatggagaaaacttaggtacgtaagccagtttgaaaggttgcattctatatgattccaatatatgacattctgaaagagacaaaattctggagacagtaaaaagatcagtgattgcctggggctctgagaaagtgcagagggatgaatgggtgaagcacatggcatgtttaggacagtgaaactattctctatgatactgtcatggtggatacatgaccttatacctttgttaaaactcagaattttacaatacagagtgaattctaatataaactatggactttagttgtaataaggtatcaatgttatttcataagttttaataatgtaccacactaatgcaaaattataataataggggaattgggggaagggtaatggagtatatgggaatgcactgtaatctcagtacaattattccacaaacctaaaacttctttcaaaaatacaagctattggtcaggtgtgatggcttataccagtaatctcagcactttgggaagtcaagaccctcagatcacttgaggccaggagttcgagaccagcctggccaacatggtgaaatcctgtctctactaaaaatacaaaaaaaaaaaaagaaagaaagaaaagaaagaaagaacagaagaaataaaagaaagaaaggaaagaaagaaagaagaaaagaaagaaagagaaagagagaaagaaagaaggaaagaaagaaacagaaagagagaaagaaagaaagaaaaagaaagaaagaaagaaagaaagaaaagaaagacagatgcggttgctcatgcttgtaatcacaactactcgggagactgaggcatgagaatcgcctgaactcagaaggtggaggttgcagtagggtgagattacgccactgcactccagcctgggtgacagagcaaggctctgtctcaaaaaaaaaaaaaaaaagctattaaaaatatgtaaagctcagtctagatacagtaccagaatagtaggaactttatttcacctgtcctacaaattatggttgtgtgccacttgggtaaaactcagaatccaaatatgtgaatgtaagatttatggggaaattatttgtatttcaaaataatccttaatgaatgcactccttctaaagtagccattaataaagcagttaatgtttcatttaattatagattaatgtacataagatatgccaggaatgcaattaggaactgggaagggggtgttattctaataacttccacatagcattgtgagacattttctgctttcttcaaatttcatttaattacattttaaacaaatatttttgtgagcctattatatagtccttcgctagcactgaggagacatgctttgtgaccttggtgatttcacattcaaatttccctttcacctacactcttccttgttttttcatgcctgtgtagattgtaaattcttcctcagattaagacattttattcacctttgtaacatccacagtatctagcacaatcagtgccttcaaaaacaattggcctcaagaattgattgactcaatgagtgactgaaagactaaattaataagtacacatctatttgtacttccctgcttacttataaggtatgacaatgaaatactgagacagttatacattacttacggactcaatctcatttctttacaatctctattcttcttttttgagtataatgttattttacaattccactaacttgtcactctttattataaattcatatctccatttcacctgagaataataaaggcaaggaagtattttaaatgatcttgttttttataactagcattcattgagcaaatcaaagtatgaaaataatataggtgtcagtgattattataaagttgtatgcacaaaacattccaatgattggggccaatacagagaaaacatctcaatatttggaattttgcttttctgtaaatactttgatatgtacttacatcatatcaattataactcctgctgaaaacaaacagtgcacacaaatttggtagttggaggagactttataaagggactaattacgaaggtttagaccgggttaggaaaaacacacggaatagtgcaatactttaggatggcaacagcgagcaccgttataaccactaggccaaaatgaactaaatgaacagggagattaccatttatcagaaaaagagggagaaaggaaggagagatgaccaagcaagtcctatgtgaagacggctgcctgacttgagctgtgtgatctttggactgataccacctgcctgcactggcctagcagggcgagaatagtcaatatctggaaaatggatcacctgaccttactttcctccctccctgtttcctctttgtggtgtttccactggccaaactcacagcgtagacaaaaggagtgcattgatgtagcagtggttctaatccagggccaattgtgctcccagggaacattagtggttatcacagctcaggggaggaagggagaggagtggagtgctactatgattcactgagggatttttttaaacatctacaatgcacaggacatccttccacaacaaagtatccagttaaaaaatgtcattactgccaaggttgaaaaaccgtggtgtagtcagtacaattcatcttctccaggcacagtgcaggagtggggtggagtgtctgaaggggaagaaggaagaaaccagcacaccccacaaaagtaaccaatgcaaataccaaataggaaaagacagcacttaaaatacaaaagtctcaggaatatatctgatagtgttttatggaatttattaaaatttagcctggagtgagtaatatttagcaagccaggtttgtctttagagaaatccttgtggggtttatacaaggatttattaacaaagggcacacacaatactcatattacagtcagtctggttatgtaaaacatgggcaagaatgtaataggacaatgtgatgtattcacaaaggattttaggactacacagataatcctctaatgctttcacttacgtactatgaaaggctatagtttgcatagtgatatagccacgtaagatagtaaacttgacattcatgcagctatacatgtttgcacacaccaggatgcatgccctttctacctggttgattttttattcttttattaatctctaatttattccccagaacactctccataaaaactttctcacaacttaaatctttaatctattgtgtggatttctgactcattctccaagcttttcctcttccctccgcaatgccttatagtcttatgactatttatccctttgcctacatttctagccagatctcttgcctgatacacactctcatatttctctttgcacgctacacatttttatttagatatcacactactactttgatttcaacaggtctcagtttaacttaatttttccttcaagcaaggagtcccttcatatcagttatcaccattggcaccagaatttttcttatgacttcccatgacctacaatataaaccatataaatcactgatgcctccatagttccctccctctcaaatttagccataagatgattttaggatccttgttttttccaatctctctttcattctctcccccatctcttccattatgaaggtttggataggacacaactcatgcctagattagtgcaatagatgctgagcctgtgcagcggtagtttagctttctctcctggttaactttaactgccacatatatcacttcacacgtcatttttcattcaaacgtatttaactggctcttcattcataagaagctggaatttgtcgtttgactgatattttaaagattttatattttttctccatcctcgttctaatgttgtatcttgtgtcatttgttcattcataaacttaagacttagctaaccactgagcatccaggaaattcagtatctatcatgtgaattctctaatactggttgatccattgtcaccagagcatagcaggcttctcctgcctttatgtatgtttgtcatatagttcatgcctaaaattctttcttaaatcttaaattcctaagatacacacttttgcccaagatcacagtaatctctgccataatctctgctggaatctgttcactgtgttgctcctgctaaacttcttacagatgactttttttctttttggtttccctggtatctagtataatttcttatataggtactcaataaatgtttcctgttgatctctacacctactctgtacaataccatagtgactagacacatgttgctatcaagcatttcaaaagtagctagcctgagttgagatataggggtaaaatacacaacagatttcaagacatattatgaaaaaaacccataaaatttctcagtaatttttttatagattacatgtagaaactataacattttgaataagttgtatcaaataaaatataaaattcacccggttctttttaatttgttaaatgtggtggctagaaaatttaaaattacataattggctcacagaataattataatggatggtattgctttagatcaagtttgtctaacccgtggcccatgggccacaagcggcccaggatggttttgaatgagatccaacacaaatgtgtgaacttccttaaaacattatgaattttttgtttgttttgtttttgtttttttctcatcagctatcatgagtgttagtgtattttatgcatggctcaagacaattaattcttcttcaaatatggcccagggaagccaaaagactggacaaccctgctttagatagtaaagcatatgagtagttaatgtgtactataagcagtgtgatctgatagactatttaatgttgtttgatggtacattattcaagtcgattattatgtctacctatgcagtttaacgacggtaatgagagagggcagcttgattacaggtcttatcttttgactaacttgctaggccacctgagaaggacccaaattatctgaatgcttaactcaactaatttgtattcacttgaagaatttcaaggatgtttatatgccatcaacttgctttaaattttttctctcagtgaaaatttttcttaaaatgagtatgtggtattcaaatttatccttgttttctatgattatcttttcatagcactgtggtttccaggaacctttttttttttgagatgcattctacatgtaactattgcacagtttgcatgtagtaaggttcattattcttctacttttccaaacacctggcatgtttacttgaggttggtacaccttgtatcccagattttgctgtttttaacttaaatattgaatattttgattaaacattatggaaagtttaaatgggtcaagaaaaatagcttttcttcccatgaagaacaatacggcataggagttaagagcatagatttaaagtcagaaaacctgtgctgcctacttgtgcaaagtcacttacatgctgtacttctgtttcttcatctgtaagttctacccctaggtatttacttaagattaatggaagcatatgttcatacaatgacttgtacagaattattcacgatagcattactcttaatagctctaactggtaacaacacaataatcaatcaacaattgtgctgtattcatacagcagaatactacttagcaacaaaaatggaatggactactgataacctcaacaacatggatgaatctcaaaactatcatgctgtgtgatgccaggcacaaatcagtacatactataattccagaaaagacaaatgtcatccatggtaacaacaagatccatgcttgctggaggtagaggcatcagttcagtcattcaggaagctgattccaagatggtgttagaattacaaccatccacaagagatttattgcaggcaatagctatgaaaggtagaaagagaacaggagaaaaaccaggcaaggaaaaaccacaatgtagttgtgatatcacttcaaagggaggcagaaggaaggagaattgggtaggaatagccacagattacagtgcagttacaagaaagtcttggcttccaacaaaggttacttgttgaggagtcatgcattaggcagacatgtctgggctgtagtttccttgctgctcccagtcattggctggaggccagtctgggttcctgtgctgtggtggatcccattgctgctgcagcaggaggccaatagcactcctggcagctaattggagagaaaagatccaagaggtgtaccttcatggctacccccatggggctggggtggaggtggaggagaaggagaaggaattaactagaaaaaggcacaaaggaaaattggggaaaataatgaagatatatgatttctcaattgtggtggtcgttacatgggtttattaatgcatcaaaactcaagaaatgtacatttaaaatgagtgcatatgattgtaagtgaattatacctcaatatagttaattttttaaaaatcatagatttctttatatttaatgcatgaacataaacctaagacactcctccactccaaaacttaattaccttgtgatcagcagagcagaaggtactttgtgatatataggtagagaagatgaagtcttgtgacatttaacaagggacaggaaaatggaccttgtcctaagttaccaaactgcaaaaatatcacctacaaaggctattcataacatacattttcaagggggttacaatatttgcctactataaaattttggatctgtaaaggggttaaattatttgtgcaggggaataaacatcaaagaaacattaagaggtccagagaagtaaaataggaagggtcttttggctagaggagatatttaactttcagaacatgtggaattaagttgtattgattatgatctgatcttcttccccctaaatttgatcctcttcctgtaatctattgtttccatcatcttcaactcttccctttccctctcccttgtccctcagttctagtcaatcacaaagtcctacagtttcactttctgtataccttatttctggaattcatctctagacttcaaaatatatatatatatatttttttttttgagatggagtctcgctctgttgcccaggctggagtgccgtggtgcaatctcagctcacagcagcctctgccacccaggttcaagcgattctcctagttcagcctcctgagtagctgggattacaggcatctgccaccacgcctggttaatttttgtattttcagtagagatggggtttcgccatgttggccaggctgatctcgaactcctgacctcaggtgatccacccgcgtcagcctcccaaagtgctggaattacaggtgtgagccactgcttccagcccaaaatatcttaagtagataattgcacgactaatctctgcttttctctcccagcagccttccaaattcatgtctcacagctgacagagttgttcctgccttcagattcatgacctggctctgtgttctagctcaggctttctctctcatatcacctcttgcctctctgttgcccccatattttcccctctggttggttggtgctcctttggaaccctctgcatatcttttcaagaatattatgacttattatgcctataaactttgtttaattatttatttctaaaatttgacagggaactttccgaaggcaggtattgtgtctttctcatttaaaagcaaattctcgcctggcatggtggctcatgcctgtaatcccacactttgggaggctaaggtggacagatcacttgagcctaggagttcatgaccagcctgggcaacacagttagaccaaaaaaaaaatatatacgaaaattagcctggcatggtggcacacccccgtagtctcagctagtctggtagctgaggtgagaggatcacttgagcctggatggttgaggttgcagtgagctgtgattgtatcactgcactccagcctgggcaaaaaagtaagatcctgtctcaaaaaaaaaaaaaaaaaaaattagtgaatcctcagtgtttaaaaagtccataaacatactaaacatagaagacctccaaatgaaattaatcaattattatttagtgggttgcttctcttttgttttaatatagttttaacaaagagtaaaagttatgatctttttatatgtaaaataaataatgccgggtttgacataaattttaggaaaactagagacgctacttcctaaaaattttctttctataatcttcctaaatatttttccataaagtacaaaataatagaaaaaaattaagagattgagtatcctttcaggaagtgatatgacaaatagggttcgagaactatttgaattctcaccacttttcataagggcagatctcaagttaaatttttctattcgaatttaaatgactttcactggaataccattacagaaaagcttctgtgtttagatggcaatatggagtttcttttcttggaatattaattgaaggagaagtcttaattttttaagtctatatctccgtatatatttgaacctattttatatgttagtccttctctttagtaaccttcatccacagtgaacaagatttacccttacctttaagcagtagcggctactttatgtgaagtgaacagctgctttttttatctgcatctagacatcaagtagtccagagtcctttctaacaccctagcaatagaagtaagaatattttgaccattccatgacttgatgatacttctagtaataatactgtattattaaaaacaaacaaacctttgtgcagtggtaattgaagcagttccttgggaacatgtattaagtactttttagcagttaagtccactctctgtaggttaaggaatatttaaataaaataatgtggcaaatgagttcaagatgataaatgcgatgagaactaaaacagctttaattttatgtgggaaataaatagaggaaaagtacattacagggctcctggacttatttctttcttcaaagtgtttctcctagcgaatattattactattttttctcttaagtaaaaaatacacaaagtatgaatctacacaggataataatattgaagttaaggatgatgtctcctccttcactctccaaaatactatttacttggcttcatggaaatctctctcactccaattccaccgtgtcaactgaggtcttctgttctttctctccctatagcatattcctgttacataaatcctaaactgtgtcgtgttagtcacacactgtaacctctagataagcgcctgtccagaggttctcaatcagagccttgcaaatatgtattaaatcaatgggtcatcttcagtgtctcagtgggcccttggatatgttttgcagactgctgtgagtatgtagggatgtccagtatcgagggaagtgtggatggctttcattggttcttatagggctgaagaacacatagagcagtaagcacttctactgtagggagagatcgagcttctcccatccccactgctggcaccaccaccaccctacaccccattttgagttctgaaagtgaatccttgagaaagaacacacaaaacaaccatcataatagtgggcacagctgtgggtggtagaataacattcccaagcttcttttcctacacatgattaatattaattcagcaaacatttattcagctcctacttttaaacaggcactattctaggtactaaagacatagaggcaaagcatacaagactctgcctttgtgaaacaattaagaaataagtaaaaagaaaagaaacagaaaaggcaatttggatagtgtcaggtgctataaagaaaacaaaatgccattttaataaataataataatacaatgttttcatactatgtgctagacactatgctagtaggtatttatagacataacctcaattaatcctcaaaatggcatgttgatatcaataccccaagtttacatatgagacttaagatgtctgagtatattcccccaggtaacaattaatatgcacaataaaactttttgctcattcatttattaacctatgttgattgagtacctattttgtgtcaggcatcattttaaggcacctggatatagttatgaacaaacaaataaaaatctctgccctcaaataattaatatctcacagaggttaggcaaaatataatcagaaaataagtataacgtataggatgccagatcatgaaagaagctatgaatggcatcaagaagctggaaaaggcaaggagacagattttctcctagagtctccaaaacagaacacagtcctgccgacaccttaactttaggctagtgagacccctattggacttcagacttacaatcccacaatgtaataaatttgtggtaattcagtaggggaacaatagaaaactaatacgatatcaaaacaaattatatcatagaacaagaaaatgtaattgtgacaaataatacctacaaaaatgttgtaaatgctaggcaaataatgtgtttaaagcacttaggccaatgttcaacgtaaagtaattcatgctataatatcatcatcatcattaccaatatttaggggctctaacaaatgatgtacgtgtaagcagatgtaagaaaatttccttgctgaagaggaggtattaatagagtatataacaatagataacaaattccaaataaaggcaaactaaatgttttattggattaaatttaattttaaaaactacaagaggccgggcgcggtggctcacgcctataatcccagcactttggaaggctgaggtgggtggatcacgaggtcaggagatcgagaccatcctggccaacatggtgaaacgctgtctctactaaaaatacaaaaattagctgggcctggtggcgcgtgcctgtaatctcagctatttgggaggctgaggcaagagaatcacttgaacaaccaaggagtcggaggttgcagtgagccaagattgtgccactgcactccagcctggcaacagagtgagatcccgtctcaacaacaacaacaacaacaacaacaacaacaacaacaacaacaacaaaactgtgagatccatggtgggcttttaagaggaaaatgcaagctaaggtttgtttagactctgagtactgcatgtgtaaaaataaaggcatgatgaaaagatcaagagattagagtgatactttttatctactagtgtcagagtcatgaccaggggattggctatgagaatacataagctgtgccaggagtaatccaaggagattgtttcaatttggaagagtgtccacagaatgattctcatactagacgttgggctattgtaaagaaagttggtaggtactccatcgctaggatcatatcagggagaaattgaacaggatggccctaatgaccctgttgtacccctagcttatggattaggcaagtcacttctactcgtataccctgtttccccatttgtaaataagaggatgtgttactctaaggatctctaagattctttgcagttgttaaattgcatagctctccactgattccatggtggaaatttgctattctattacaaatattctaaatgtatgagatatcagacatactcatttaaaaaacaaaatacaaaaaataagtattctacaaataaacacagataatgtttaaattctatatgtctttgtttctcttcagaagcatccaaaatacaaaccatctaagaggcaagaaaatgtcgtgatgttcctagtgcaagttaaaaagatttgctttcctcaagtcggaaagcccttctcatttttgaggtttttttcttcttttttttttcaagtgaaagcattttggaggagtcaatatccatctttaaaggtagccaggtcacatgtatacatatgtaactaacctgcacaatgtgcacatgtaccctaaaacttaaagtataatttaaaaaaaaagaatttaaataaaaaaagaaaatcagagagaaaaaaaaaaagatgcatgtgcaccctgatactaccatccatagtgatacggtttggctttgtgtccccacccaaatctcatcttgaattgtaacccccatgtgttgagggagggaccttatgggaggtgattggatcatgggggtagtttctccatgctgttctcatgatagtgaatgagttctcataagatctaatggtttaaaatcatggcacttccttttgctctctctttctcctgccatgtgaggtgtgccttgcttccccttccccttctgctatgattgtaagtttcctgaggcctcctcagctatgcagaacggtgagtcaattaaacttctttctttataaaaaaaaaaaaaaaaaaaaaggtagccaggtaaaaattacttgtttccaggacattttcacctgaaagaagcattgtcatataacatagaagcaagaaatccagtagtgggggttatttaaaaatagctggaaaatttcaatcagcatgagtttgaagcaacaatttatcatcaccttttatggtgggtggggttaagaacatttcagcgggcaaagtggtggtgatggggaagagacaccaggggaggtgattcccattgcattgctttgtaaacagaggcacaggttcttcatttttgtcacacaaaatcacagctatgcagaatttattaatttattcttctgagacaagaaaaaagccaccaaaggaaaccaacagcttgctcctctcacactgggggaaccatatgagagacttatctatccctgactttaattttgacctgaggagagctcctcttaaggaaaacaaattaattcaatgactatactacttaatcattgacctttatttaataagagatttttccataggatatgctgagctgtctcacttacatcagttgtgtctcctgaggtgggtgacaggagaccacaaatattgcatagcacacaaatcgttaatagcagctgtataccaaaccattacctaaatatgtagagtacaattcattctcactaatgtcagagagcatgctataaaatggtgaatccggacagctgaagatactgaataataacctctattttgaacaagtttacagtgttccaatcagtaattaaattgatacctgatgaatatatgtgtgtgtatgtattcatagcagagatggttttcctgagataaggattttgttattcggataggctgctgctggaattgtccttctacccttgtttctttgtccttagtcatcactcatacctctttccactcttctgccatcacttttgtcaccaaagtcatggtcctttccccgccgattgctgctgcaggtctagggcaccaagacttaggcagcactcaccatgtgccaagaactggaccacaggtaccatccagcattgctcatggagactctgtccctttctgtaggacaccctccttttagctagcaacccctccaccacctagagcctctggacctctcattttaatattaagaactaggaaaacttaccgctgagaataactagtacaactagaactggtagagaaatctgggtctcttgggaatggatttttaggctttattgattagaggtgtattaataatgcagtgttatagtttcatgacataacgaataaaaaagttcattttggacttgcctttcagctccctaggagctaaaagacgtatttaatgtaacttgtgtggtggaaataagttcttttttcaggcaaaagatgtgcaaacccatctggggaagaaacattaaaaactaaggagacagtgtcctagataactatgttcttttcctgttttagtctaaaataatgattagttttcttatatatcttcatttgtcttggttccttttagcccaatttaataatattattgcagatattgatgaaaacctttaccttcctcttaattcatcaaagtacttgataaaatttatacatagtacattaattgggaggtttttatgagattaattaatataatgaactgatgttgaaattatttaaaacctgaattattattgtattaagtaggacacttaatacagttaatcagttctgtctttattcatttgtgagaatttttggcaagctattgtgaatattcagggaagggaatgtatttttagcaggaatcttatacctcctacatagaaatgaagcatttactgaaacatccatgaaacaaaatgtttctgaatgtgtactatacacttgttataagccccttttcttctgtagctatattttggagaaaaatctttgctttgacaaaaaaaattatgttgacttacacatatattttataactaagcagtgtttggtttgtgataaaggatacaaaaatataaaaatgttcagcacacgtaagtaaggccttgttgacagtgtgagttatgctactggatactcaaaaggaacattcagtgttctcaggtggtctctagactgtctcaagcctaggaagatattttataagcaaaggaataagagaaggaagattcagatttaatccaagtgaagaattcagttttgtgtgccttatcctgttattttgagaggcagccaaaagatgctggtcagcaaggagaattgtaagttgggcagccaactctgatttctcaacctcttagctgttttcttaaactcagaatttttaatgaatttaaatgtccatatcaggtagactttggggatgcttttaccagtgattttcagaatgttactttctggcatttcttttcacgtagcattatattaaaaatgaattcattcatccaccttcccttgtccttactaattttccctcctactcccttcccccttgttcttgccatggggacatgcaaacactggtggttgatgtctgagcaaggctgctgacagggggaggaaggagatgtcaagcagaggtcaatggcagtgtgcccagcagcctaggaagtaggagggaaaagagagagagacagagatggtggatgaaagagaaagccaggatgattatggtggttatgatacttgtcatgctgaacacccaattgagcacccaataagcacataataatttaatcatcctctggcttggatggcagtgttctatcagtgttgacttcctggttgtgacagttttacagtgttagtgtagaagagaatccttgctttagagaggtacttactgaagtacttagggttaatgcaccattgtgctggaaaaagatacgcacacacacgcacacacacacacacacacactctcacacacacgcacaaatacatccatgtgttaggcagagggagcaaatgaggtaaaatgttaacaattaggaattctgggtgaagtggatagagggactctttgactgttcttgaaacttctctatacatttgatctgtttcaaattcttcagaaaatcaaactacaaaaacttaattcatttagtgaacatctactgaacatctgtatattaaatagtgttaaatgaatgtcaattaaaatgctcaaacacagtagaggttgattctcattcacataagtccatggtaggtgtttttggcaggtgggtgagtttctcccttagggagattgaggaacccagactcctcccaagttgcagccccaccgtcttctgaggggatgcatccatacccacttcgaagtagcatacattatttcctttctcattcctttggataccagccacaatttattcaaggtagacagaaaattgtagtatatagccatatgccctgacaaagaagggagaacagattttggtggacaactagcaaactctgatacaatctgttattaagcactgtgtgtggatagatgctaactagaaggagattatcttcccttcagcaaatataaactgaatgccgtttatttggttgaaactaagctagatcatgggagtatagaaattttataagaagacatagtcacttctgtcagtgagctcaagaagaattagtatgcggaatgtaatcatacctacagggggcttgtgccacttaagtaaaatgaaacattattttgagtacaatttagcaataaatgtactacgagatcattaaaaatcatgtttgaatgttattgtgtcaaggatgggaaaaagacttttgggttgtagacttgataattatagttaaaaacagtttttattcttgtttagtcttattttttatgtttaaacatatttatacttgctaacatttatacttgctaagtaaagactgtttttacaaccatgacaagaacaaaacatattagtaatgcaaatgccacatttcctacaatcaactaatcacactaacatatttgcatggaagaatcactgggattgatctggccacgtgtgtagtcatgcccaaaatgtgaagtccatctgttttgcaattttttttaaccactgttatccaaatgctccttggattttttttattagtggatatattttggaggtcagacaccctcttggctagatcatcacctttataacaaatatatatactattctcatggaaatatatttagacattgccctactgggaatttttttcaagtaattaatgtacagcttgtgcaacagcttgatcttggcttcatggaaataattcactcttagcagcatctaatgccacaaagcatttatggatgtcagctcagaacttacttttatttatctctgagttacttttttttttttttttttgagacagagtctcactctgtctttggcttgtccctaacctcttaacagacttaatattaagctccatttcactcagtcgttctgttgtcatataaatgagacattctacaagcatagtttttagtttctgccagagcatcatacaacattgtgagctatgatgaagataaagacctagagaagatatttaatatgaagttcattatctaatatttggtatgtgtggcaaaatagcaatctactgcttggttctgctgtaatctatttacccacccatcccatctttctttcaatttaaaaggataatgattttagtcacgattatacataaacccattaccataggcaataaacaatggggcaaaccattggtcccatagttggagtgtggtctgaagtgtgttttggtggagagagatctatgtctggagatagctaacatggatttggatcccagatctgctcctacctgttgctgtgcctgtgaccaaatcatgtgatctctctggtttcagtttacttgtgaataaagtaaataccttcatcaacacctgtttttgaatacaatgtttttctgtaatttttgcttcttataatgttataatgatcatccttacatctaaatcttggtttacattttcatcaattcttttggaaagattggagaagtaaattttggagatgtatgtcggctattaaaaatgtttaattttttaattaaaaattaaaacgttgaaaaatcctgatgcaaaataaatgcattatgcttagtgaactcttctcatttcgaagtttattcaccttcttgtttttgcaagtttcctgaaaaatgcatataaagtcactaagttagcagaactttataaaattatataactatatataatcttttgatatcagtgaagccagctgatcctatagaaataatgtaggaattataatcactagcacataatttaagagtcctgtggtcttattcatgttatttaccctctctgaatcttacatatagtaagagggttattatacataatatgtgtacatgtatacaggtaagtaagtatatatgcttatgtgtaaaagcagagttattgtgagagtcaaatggaaatgtgaaagtactttgtagttttttattactattattaatttttaataaaatggtaacattcatttaataatcattagttttaacttcagattgtactggatttcctctagtatttcttaagattagtgaataaagtatttctcctaataaatatattgactactgtctttcgatcaaacatattaggtatatttttacagtagcatcaggcagtgaaaatttgaagctctttatagaggactgatttatgatgaaaaggaataacatgaacaaatggaattatatgaagcttccccagaaatatctaagaggggccaattttaagaaatatctgacttctttttcatggacatttcaaaataaacctaactcatatggtacagtttttaagagggaaaagaaaaaaccatctgagaatctctggaattctgccgaaagtatcacttggcattttattctaccttctggatgcagttgattgacagtagtgttatgatgccaggggtatagtgactagaaaaagaaaaccagggaattcagtgttcttgctcatgaagaacagcttggttctttaaaaacaatgagattttgccaccccatctcacaaacctatgatttgtgagaacaatcccttttgtgttgcaagacttttacatttctcttcccacactatattagaagaataaacattgcttcataagtaccgattgatagtctcatttcatatttttaaaatagagttactttaaggttaaatttttcatgtagattaaaatgactaagtaaccattcacatatttcaaataaaatatatttttactacaaaaggaaaataactagattcttaagtgttatagtcaagtgtaattgagtaatatgaattctaaatgaatttctaagatctgctcagctttcactactttaggaaggaacaacttaagaaaaattttaataaagatatctcttcacacacatggcagtgttgtacttagagaacatgacccaaaattttttatgactgcatattgaattcctgatactcttgggaagctccaaaagcaccagtggagtttccagatgtaactgtggctgcagacccgccagtcccggtgttggaagggatcattataggctcttgtgtgcagactcatcttcagacccagaggaattaaataacttgcccaaagtcgcacaactttctcatggtaggttgggcactagaataaatattgctttttcttaagagttttagcctccgtattatgaaatcttctatgttctgctgatgatatctcctttcttcatctgttttctatttttaagcaatggaaatacaaacttgcaactccccatttccaacacaacttagaaaaaacaatatttaaagaaaaaattacaggcatctcatctcctttacctgacagatgcttgatagtaatggcctctagatagggatgacatctaatataaatgtgtcctttcaagtcaagctttctctgttcattagtagaaatattgtatatcaagtgtgcaaaaattttcttcaacagggagctttgtttccctccttttattataacaatctgagctttgtggtcccagggtctcctagtgcctgtctttaggtctgtttattcacatgaagaaagcatgtcatatagtattatctaagactcaggctgcttatgcatgatgacagaagggttcccaggcacaaacattcatccatgcattcatccatccacctattcatccattgatttggctgataattattgactactgttgagttgccctcagatttagtttctgtccttctgccatggggaaatatggggttaagccacaacatactcttctcttctttttctgcaccttcttagtatatttagttccattttgtctagccctgcctctgacttctttgttgtacttcaggttttttatcattgaaagttatttctggatcatagatcattctcttggtcactttgcttgttcacttataaaattaattcagaaaaaatgacccacagtaattaccgtaaatcacagaccataaactataatactgtatattgtattatagtacagaaatatttatactttaaaatgttttaaatatagatattataaaaagatatgtctcatataagtaatataaatacttttttattacctcttctctccctattctccaggccagtgttttaaaaatccatctttatatgtccatcctggaaaaaactcatgatcataaatgagtttctcaatagagtttataagcccacagttgaaacacaattgtcttagcatccatttagttgtcatacttttaagatttaatggcaaatattatgttttgtttcttcaaaagaaatattttaaaattttagtaaaggcagttagagaaggtagagataatggactgtttaatcctacttttcatcccacaagtgaacaaaaaaatgataaaacatttttcccaaaatgtagctttaactatacttaaatttggactaaaatgggagatatcttttctactattgaaaagccgtgtctgtagattaatgctaaaatcgggtgtaaaagcaaaatttgtttggcttgattgccaatggcccattcatttggctacagaaacaatagcacatagcaacagataatgatgtgagatcacctagctcaagtaagagtgtctgatccgtcaaaaatatatacatcaagattcaaaagaaatgtgtgttttctcaagtcatctctgtaaaaatacattaaatagaggaatagaagtttgactttgaaaatacattgcagacccaatccgtctttcctattttctggtgaaaagtatcaaatatgtggaacctggaactgctattctccttcttaaaaatctttcttaatattctattgataactggtgcaagcctaactttttgtcttacccgattcttctcacaccaaagtgataggaccttcaggtagcctttggatagaagataaataataatttaactattgatggaagttagtattagaattagacttggaagtctatggaataaaatgattctacaacaatttgtacttcagacattagtataacaaaacatgtttgcccgtgcatgcggaaacaaccaatttcatgtggatgcttatattcacaaaggagtaaccacctggggtttcccactgttgctccagagaaaactagcagcaggagaacttctctgaaggtatcaagacatctttaaaaaacacttgttaagtgttggttcagctaaagcagggagttttcagttagtaatggcttttaaaaattaaaacaagtttagcatgtaggtcattaaccttgaatcactgtcatgattattattaaccatctgttctcaaatcgaaagatatttttcttttctagatcacatttattctcacattgctcaatttcactatatatcaagacatgaaaactgtaaaaatcacaccttctacattattatttttattgaaaaattcctaatgaaacagtgcgctctgggatagagaaaggaactaactgacattttgcttcttaacttgtttttatgcaagttctaagtggtttctggccatgtacataaaagacaaatatctggaaaaaaaactagcagaagtcagttatttggctctatctactttgagaattatgttatataaatgttaggaaattttttgtaatattcttatttagaaatgaaatataaaaagttttaaaaatatctaaggacagtatacagtcctaaagtaaagctgttaggtaaatgctacacaatcctcttattacagagtcacttacctgagaatataagaagagggcctcttgtttaagagtaaatgtgagctgcaatcaggattctgcactcatttggacacttagttttgtttttccatgactggtgttgcctgttactgagacacctacctgtcatgtgaccacagcttatgttacaatgtgtctagtcagacttagagatgtgtgaaagagcagtacctagacgggaaactatgggtctataaaggttttgccttcttgggcggagttcaaactaggaagccacaaaacttccagttgcattttcacagattaatgaaatatattttacacttttcctgaaagatattttatttgtgcaaaccttgttacaaagtacagccagttgattaatcgatgaagtgatttgtagtggattcttatattttgtgtaagggtatatgtgaggccctatatatgaggctttctatataatgaagtataattcagttcagcatttcaattcagcaatcacttattgggcctctactcagttgccttcagggctttataatttaattgataaagggaggttaattaattaattataacaacagatcgcttaatagtgtaactactaatttaattaatgacaaataacaatacattaaaagaaatgcattaataaaaataatatattggtgttatagacaataattttctgattaactttattattattatttcaatagcttttggggagcaggtggtttttggttatatggagaagttgtttaggtatgatttctgagattttggtacactcataacctgagcagcatacactgcacccaatgtgtagtctttcattcctcaccttcctcccacccttcccctcaagtctccagagtccattatatcattcttatgcctttgcatcctttagtttaggtggcagttataaatgagaacatgtaatgtttggttttccactcctgagttacttcacttagaataatggtctccaactctatctacgtagctacaaatgccattattttgttcctttttatggctgagtagtattccatagcatccacacacacccccctatgctttatatatatatgtaaatatatcacattttctttatccactcattggttgatgggtatttaggctggttccatatttttgcaattgtgaattgtgcagctataaacatgcatgtgcaagtgtctttttcatataatgacttcttttcctctgggtagatacctaggagtgggatcgctggaacaaatgattgttctacttttagttctttaaggaatctccataacttttccatggtggttgtactagtttacattcctaccagcagtgtaaaaaaatgttccctttttaccacttccatgccaacgtttatttttttattttttaattatggcaattcttgcaggagtaaggtggtatcacattgtggttttgatttgcatttccctggtcattaaagatgttgagcattttttcatatgtttgttggctgtttgtctatcttcttttgagaattgtctattcatgtccttagcccactttttgataggattatttgttttttcttactgatttgtttgagttccttgtagattctggatattagtcctttgtcagatggatagtttgcagatatttctcccattctgtgggttgtctgtttactctgatgattatttcttttgctgtgcagaagctttatagttttaggtcccatctatttatcttttttgttgttgttgcatttgcttttggtttcttggtcatgaactctttgcttaagccagtgtctagaagagttttaccaatgttatcttctataatttttaaggttttgggtcttagatttaagtctttgatccatcttgagtggatttttgtataagttgagagatgaggatccagcttcattcttctacatgtggcttgccaattatcccaacaccatttgttgaataggatgtcctttccccaccttatgtttttgtttgctttgttgaagatcagttggctgtaagtatttagctttatttctggattttctattctgctccattgatctacatgtctatttttatagtagtaccatgctgttttcctaactatagtcttgtagtatagtttgaagttgggtaatctagtgcctccagatttgttattttttgcttagtcttgctttggctgtatgggctgttgttttgttccatgtgaattttaagattttttttcttgttctttgaagaatgatggtggcattttgatgggagtcgcattgaatttatagattgtttttggcagtgtgctcattttcacaatattgattctgccaatccatgaataagggatgtgttttcattagtttctgttgtctgtgatttctttcagcaatattttgtagttttcctgtagagatcttccacctctttggttaggtatattcctaagcattttttttttttgcagctgttgtaaaaaggctcaagttcttaatttgattctcagttttgttgctgttggtgtatagcactggtactgatttgtgtacattgattttgtatctggaaactttactgaattaacttatcagatctaggagctttttggatgagtctttaggttttctaggtatacaaacatatcatcggcaaagagcaacagtttgacttcctctttagcagtttggatgctctttatttctttctcttgtctgattgctctggctaggatttccagtactatgttgaatagaagtggtgaaagcaggcattcttgtcttattccagttctcgggggaaatgctttcaaattttcccccgttcaatataatgttggctgtgggtttgtcataagtggcttttattaccttaaggtgtgtatcttatatgccagttttgctgagggttttaatcataaagcaatactgaattttgtcaaatgctttttctgcatctattgagtttatcatatgatttttgtttttactcctgcttatatggtgtatcacatttattgacttgcatatgttaaagcaaccctgcatccccggtatgaaacccacctgatcatggtggattatctttttgatatgctgctggattcatttagctagtattttattgaggatttttacatctctgttcatcagggatattggtctgtagttttctttttttgttatgtccttttctggttttgatattagggtaatactggcttcatagaatgatttagggaggattccctctgtctctatcttttggaacagtttcaatagaatttgtaccaatttttctttgaatttctgatagcattcacctgtgaatccatctggtcctagactttttttgtttcctgacattttttctattattgtttcactctcactatgcattattggtctgttaataatttctatttcttcctgttttaatctaggaggtttgtatatatgcaggaatttgtccatctcttcttggttttctagtttgtgtacgtaaatgtgttcacagtagtcttgaataatcttttttatttctgtggtatcagttgtagtatctcccatttcatttctaattgagcttgtttagatcttttttcttgttttcttggttaatcttgccaatggtctattgattttgtttatcttttcaaagaagcaggtttttgtttcatttatcttttgtattgtattttgtgtttcaattttatttatttatttatttatttttatttttattttttgagatggagtctcactcttgttacccaggctggaatgcaacagtatgatcttggctcactgcaacatctgccttccaggttcaagtgattctcttgcctcagctgcccgagtagctgggactacaggtgcctgccaccacacctggctaatttttgtatttttagtagagacggggtttcaccatgttggccaggcaggtctcaaactcctgacttatggtgatccgcctgccttggcctcccaaagtgctgcgattacaggtgtgagccaccacactaagactcaattttatttatttctattctgatctttgttatttcttttcttctgctgggtttgggtttgctttgtcttgtttttccagttcctagaggtgtaagctcagattgtctatttgtgctctttcagactttttgatgtagatatttaatgctatgaactttgctcttaacatggcttttgctgtatcccagaggttgtgataggttttgtcattattattgttgaattcaaatatttttaaaattttcatctttcttgatttcattgttgacccaaagatcattcaggagcagattattcgatttccatgtatttgtatagttttgagggtttcttttggagttaatttttaattttattccactgtggtctgagagaatacttgatataattttgattttcttaaatttattgagacttgttcatatggtctgtcttggagaatattccatgtgttgatgaaaaggatgtagttgttgggtaggattttttgtaaatatctgttaagtccatttgttctagggtatagtttaagtccatgtttctttgttgactttctgtcttgatgacctgtctagtgctgtcagtggagtactgaagtcccccactattattgtgttgctgtctatctcatgtcttaggtctagtagtgattgctttataaatttgggagcccaagtgttagatgcatatacacttaagattgtaaatttttcctgttgaactaattattttatcattatataatgtctctctttgtcttttttaattgttgttgctttaaaatcttttttgtctgatataagaattgctattctttctcactttgagtttccatttgcatggaatatctttttccacccctttaccttaagtttatgtgagtccttacgtgttaggtgagtctcttgaagacagcagatacttggttgatggatttttatccattctgccattctgtatcttttaagtggagcatttaggccatttacattcaacattagtattgaggtatgaggtactgttctattcatcatgatagttgttgcctcaataccttcttgttgttgctgttgttaattgtgttattattttatgggtcctgttaaatttatgctttaaggaggttctattttgatgtattcaagttactgtttcaagatttagagctccttttagcatttctcagtgctggcttggtagtggcaaattcagcatttgtttgtctgaaaaagactttatctctctttcatttatgaagcttagtttcactggatacaaaattcttggctgataattattttgtttaagaggctaaatatagggcccaatctcttctggctagcagggtttatgctgagaaatctgctattaatctgctatgttttcttttataggatacctgatgcttttgcctcacagctcttaagattctttccttcatcttgactttagacaacctgatggctgtgtgcccaggtggtaatctttttgcattgaatttcccaggtgttctttgtgcttcttatatttggatatctagatctctagcaagactaggaagtttttcttgattattccctcaaataagtccttaatgaccccactatataacatgaaatatctgttattggtactgaggtgctggccacaaacaattctgtgtgtcctgaaaactcttcagaatattcgtcatctttagcacttgttatcttagtgtttgggcttggcttagagtgatacatctcataacagggcaacagaaagaaccaggaaccaagatttatataacataagtcagtaaaactagaggcaccagaggtttacatttacattaggttacattttctaacaggtagcaaagcacatgaatgaagttcagtggaaggccttcctcaggaatccagtaaaaaccaaacatacacacacacacacggacatccgtgaggcaggaagggatgtccactatagtacagacaagcatcctggaaggccatcaaggagtaggtgggtttcagttgcctcaggaatgtggcatggacccaaactaagtgagtacagatacttgtcattgaggagaagattcaaaatagcatcctaggtgtaaaaactgaggcacctggggcaggggaactaggtctctggaatgttggcttaaaagcacccctctcaggaaaggcctcatatgccatgcagggggttatatatgtgttgtgggacacagatggcaaggagataattctatgcaccaggctccactactaacaggtaaacagaccaacattaacagagacttaggtaaaaaggtaggtgcccagtggtcagttctcaggcacttccaagatgcacctaacagaaatgtaacttggtgtctattgtgtcctaggtctaacaactgaagagaagtgaattagtacctcttgtggacagagaaacaggggcagagacccattacaaagctgtctcagataggcatttgaagctgtttaagtatgtagaggcttaagtcaggctggttctgaaatgtgagagagggttaagcttcatgggaaatcagcagggtagtttgctattttttattataaccaatctcacaatagtttgggacatcaaatatcaaattgttgggaatatttatccatattagtctttttgccactaatatttaaaaatagtttacaatatacaacaaaaagttgtaaaatttccatctccacttaatcgatcttatgtaacccatacaatacatcaaatgtcctttccccactttatgtttttatttgctttgtcaaagatcacttggctgttagcatttgggtttatttctaggttctctattctgttttattggtctgtgtgcctatttttataccagtgccatgctgttttggtgactatggccttatagtatagtttgaaagcaggtaatgtgatgcctccagatttttctttttgcttaatcttgctttggctatgtgggctcttttttggttccatatgaattttaggattgttttttctagttctgtgaagaatgatggtggtattttgatgggaattgcatttaattgtagatttctcttggcagtattacccaggcttttcttattttggcaccctgtgctgctgtctccttttccttctttctgcttctcttaaccaactgttacctacacttcaatactttctgagggcaattcatcctccagtaagtctccctgaatcttctcttccttccctggcttattatatatccttcctcttggttcccatagcacctatgcacacttctgtcattgcacttgccaatttgttttataatgatctgctcatctgtctcctcacttagactatgagctcactgagagcaatggctgttgcattcaccttatatcctcaacaccattctgaaggcaagagaaagaatacccagaggtggagctgggaagctggttgtccaagtagtgaatgactctagtttgaattgaactctatagccagtgggcaatgtggatgtgttgacagttttttaacaggggactagtgaaaacacattttgggtttagaaaaaattgcaagtctgatgacatacataggagaagagattagagataggaatttcacttcagaaatttaaccacaagagcaagtgacagatcacggaagtctgaaccagactataaatgtgagaatagagaaaaaagttaacaatttgggtgtgaaagggcgagggagagaggtgtgaagaatgactaagtgtggatctgtttttaaggattgaatggaaatttgagcattttagctaatcaggcctaatattgagcaaagcaaaactcttgcaaattgttatttcaagtgtgggctgagaaaatgaaaaaatataaattctcacgttataacctcttccgtgtgtctgatttgatagaatccagccccattgcctccaaattccattgcatcttagaccagcaaacacaagtgaattctacttaaccccagaattctgtatgaaaatcttactgcctttttttttctaatcatgtgtcaaagtgtgggaagaacttttatttatgttttaataaattgtcagtataaccatttttacttgaaaatattataatttttcaagtaaacaaattgtttctctaagttgaaaattttatgatggaataaaagtatttttcctcaaaacacatagaaattttacaacaatattttagagttaactaaatgtttctttagtagtttagtcacttaaaaagtgatatgattatgaaaatacttaaactttgtcttttaactatttctaataatgctattggtataatttcatatttttatactgatcttttctccaaactttagtaaaacatacttctgtaaacccctgcccacaaaactgaagtccacatttacttctgaatgactgataagtttgtaaaagtatgcatgaatttcgttattaaattaaagtttttattatattttatgcacaatggtataaattattaaattaattttcaagcttatagaacattgataaagattgtcattagaaaaccctgagttgattgttatacattacataacctttcattggtggattagtgaatatgttatagggtgaccatgaatccaaagaatcaaagctggctacagcaaacagagggtcaaaaggatatggaactatgcatgatccagcaaaacactcaatatctgttttcctggaatgttaaaagacaaagaagaaaacttggggaacactagatgcatatagttctggttctttaagaataaaaatatgggccgggcccggtggctcatgcctgtaatcccagcactttgtgggaggccaaggcgggtggatcacaaggttaggagttcaagaccagccaggccaacatagtgaaaccctgtctctactaaaaatacaaaaaaaaattacaaaaaaaatacaaaaaaaaaaatagccaggtgtggtgacaggcacctgtattcccagctacttgggaggctgaggcaggagaatcacttgaacccgggaggcagaggttgcagtgagccaagatagtgccactgtgctccagcctgggtgacatagtgagactctgtctcaaaaaaaaaaaaaagaataaaaacaagaatggtcagagtcctagtaccttgtccagtgtagtgctgccttgagattgcattgcaatctgtctgagagatagtaaaagaaagtgataccttccttagccctgtttctctttagactatgctttcccctctccaagttaatatctctcagtctaaagcctgggaaaaggtgccaattttgtttttctttcttcctcacacctcctagaagttacactgggacactattacttttttccaggctttggccatgtgtattgttttggagagtcaacttccttttttctttcattctgcaaatagttttgagctgtcactctgtactaggtgctataaaacttacaggtgcattttacatgcctatttcctataggccacgatttaacaaaatgttcataaatgagaattaggagtgcatgtattgaatcaccacacattaactgaacagctttcattggccagagactatattgacagtggagattcaaagataaactagagaaatctcatgcttaaataactttctataataaattatataagagaagtaggttcagggatcttgggagctcagaagcaggatgagttaaacaaaagttggattttgcctttagcttggtttcattatcctgaaggaagagcctgaaatatagtgtagggtgcaagtagtatatgtgggtggcaatctcgggaaacaggagcatgtgatgaataaggagaaaaagccaatataaaggtactgcattgagggcaatgagggctctaattctctgcaccttctcaagcattgtgcagattggttttctggattatcagcctgaaggacaaaacgaagaaacagccattagctcctgtctcccattgtctgagagctgccactaggatattaacttcctgaaattctgcagaaatctcctcttactttggcactggagatgcccatacgcagaaagcaaaaaggcacagcatatttaaggaagctcataagaaacagtgcatccagaagtggcgagaattggaggaatggacatgagactctaagaaccagcgcctttgatgttccttttgatctgttatgtagctcttcttgtacacaggtgagcaaaggcatgctggacaaatggattcacatgtgctaaagcatggggcaaaaaccacatattaattcaggaaaagacaagatgcgtggccctctctgtctctgtctaagggtgaattaaagaggggatatatgtacagagtggcagggcaggacttgagataagaaggctaggtgggtgctctcatgctagtagcattatagtacaggtgatgagaagctcctgaagaatcatcttaacatttgtattttagagcaacagtattgagttctgacttagagacagcaaaactaaagacagaaagactattttgattattaatgatgtagatataagaatatcgtcaatgtgaactaaagcatgaagctacttatgatatatcattaaaaggatttaactgattggagacaaacgagagggatggggaaaagaattcatttgtttttagttgctctttttttcctacttattcctttgttccgagtgtgaataaactttgtaaacttttatactaaaacattctgctcattcatacttatttctttgatgaaacaaggaaacccttgtatagttataaacgtgtgaatcaatttaaatattaggaaatttttttaaataaagctagttttctgaaggggaaaaacttggttcaattttttgctggcaatctgctttgtgatttttgaacatgatatctacatctagactcatgttttgctagctggaattttttttcaaattaacgctaccattattatatgctttactatttagcttttgcagccttggaaatctatgattaatacaaataattctctatggcaattttaaaaatacatgtaaaagccttcaatctacattgctactgtgtcgtagcacaaaaaaagaaaatgtgatcaaattttaataaaatctacaatttattcccttctaaatacagtcctagctcaggagaaaggaagctatttgtatttttcagaatcaaatttccctaaatgaatatagagaaagaattataactgaaatattgttgaaacagtggtcatctcaaatctgaaggtcattccaaaaaagtttctgagttttcattgcctcaatctaaaagttggcctttttggtaatagatgaaagtaaaataattgaaagggtctgttgcagttttggaatatcttgaaaatatagtagagtgaagccttcttcccttaaataaaagacaagttgctgattgttttctttctagccagataagaataatgccttctttctcttgttagtcttaacacctcacttgttactatgtgtcagaaaggcgagacaccataaatggagatactactgatggaggtcatctgacatggggctggtaggcagtgggaagactggtatggacacaggtggcttaggggttggggaatgatatggaactaaggaaatgataattagcagaacccagtgtgcatgtgtgtgcattcgtgtgtccgtgtatgtgtgtactgtagcacaatgcaagaaagaaaaaacaaggcagacttttcataatttcagggataaataaatcctttatcacttcatgtagaatattggctacttggaggtatatctaaacgtaaatatataactatataactacatgctaattaaaaacatacaaagaagaagtgcctaaagaattacaacagaaagtggcatagtgattattagagttaatataatataaataaggccaggcatggtggctcatgcctataatcccagcacttttggaggtcaagttgcagggatcacttgaggacaggggatagagacaagcctagccaacatggtgaaacccatctctactaaaaatacagaaattagctgggtgtggtgatgggcgctggtaatcccagctactcaagaaactgaagcaggagaattgcttgaacccggaagctggggctgcagtgagccaagatcgcgcactgcactccagactgggtgacagagaaagacccggtctcaaaaaattaaaaaatagtataaataatatttcaaaacacaagtctgttaagataaaaggtacagaggaatggtgagatgacttttttatttgtgtgataagggactgttttctgtgattgtgagaaagaccaggagttaagaaaaagtggccatcaataaatcagccacttatggggaagaaccataaaccactctcagatgaaatacaaatgcagtcattatttaatattattggaatatttgtattagtttttggtatgtgctgctagtgctggtacattttagtagtcaattaatattttgttaatcttaatttctaactaaattccagagtgaaatggaaataataatgaaaaaattttatttacaaaacagattttgtttttttctgttaagaatgatacacagttgtccttcagtagccataggggattggtttcaggacctcccttgggtactaaaatctgcagatgcctaagcccctgttataaaatggcttagtatttgtatataacctatgcacatcctctcatatactttcaatcaggggtccccaaccccagggccatgaccagtactggtccatagcctgttaggctgttcgataccaggctgcacagcaagagctgagctcctcctcctgtcagctcagtggtggcattagattgccataggagcacgaaccctattgtgaactgcacatgtgagggatctaggttgtgcgctccttatgagaatctaatgataaatgtaatgtgcttgaatcatcccaaaaccattccccttcccctcaccatccctgtccgtggaaacatttcttccagaaaaccagtccctggtgccagaaaggttggggactgctgctttaaataatctctagattactgataatgcccaatacaatgtaaattctatgtaaatagtttttatactatattgtttagagaataatgaaaagaaaaagtctacatgttcagtttaagtgttgataagtgtgtagagaaaagggaacccttgtacattgttggtggaaatatagattggtgcagtcattatggacaatagtacggaggttcctaaagaaattaaaattagaattacctaagacccagcaatccctcctctggatgtacccaaaggaaataaaatcatcacctcataaagatatctgcactgctatattcattgcagcattatttacagtagccaagatatggaaaccacctaggtatgtgttggtgcatgaatggataaaagaaactgtggtatatgtatatacaatggaatattattcagccttaaaaaaggagaagaccctgtcatttgccacaacatgcatggacctggaggatattaagctgtgggaaataagtccaacacacatccacacacaaaattgcataatctcacttatatgtggaatctaaaaagaaaaagttcaaatataaagttagaataaaacagtggttaccggccggatgtggtagctcacgcctgtaatcctagccctttgggaagccgaggtgggtgaatcacctgaggtcaggagttcaagaccagcctgaccaacatggtgaaatcctgtttctactaaaagtacaaaaattagccgggcatagtggcaggtgcctgtaatcccagctactcaggcagttgagaaaggagaatcacttgaactcaggaggcataggttgcagtgagccgagatggcgccacttcactccagcctgggcaaaagagcaaaactctgtctcaaaataaaaaaacaaaaaacacagtccacacactggttaccatgagtgaggtggcagggaggagattgggagatgtagatctaaggatacaaagtagcagatatgtaggaggaactaaaaagctgacatgcaggatgacaactatagttagtaatagtgtattgtattcaggatttttgctaattgagtagattatagctgctcttgccacaggggaaaaagtgggtaactacgtgagatagacaatggatgtgttaatttttgtcactataataaccttttcaccatatacattcatcttataacagcatgttgtttactgtaaatatatacaataaaatttatttttaaatatctgagtatgatttgatgatttgtgaaaatagagtgaattataataattttaaatgtaagttaatgttattagaaaagaaacagaaagaacataccacacagaaagtctgtctgaaggatctttgttttctccaccaatacaagtgttcattgattcagaggtggattatgagatatgaccataaaacaaaaatttcaagggaaatatattttattcaatgaaaaattctcaacacaactgttatatgccagtaaacactatatcttttaaataacaggtcatatctattatatttaaaattcaaggagagactacattagagatgctattagatcaacttctaatttcaaagatttctaagatatggaacagttactccttatacaaattaaaaaagcaaatgctgaagaaattcagctacatggatacaccatgaggtggaaagatgctccataactcttagttaaactgcactaattacacataaaaggaaaatgtttcatttcactgtaatttggaaaccaaagaaagaaaagactgaatttttacatactgttaaagagattgcgtatctgttctaagtttaagacagaggcaaaatgtattttattcatttgtcctgcaccgtttagaaataaaattcaacttccttttaattttttttaagaataaaaaactcagtctaaggaaagtcttaaagttttcattttaagtgatccactgttctagaagtttaatattttgtttaaaatgtttatgttctgtattccaccaagtctagttttaaaacaaaacaaacaacaacaaaatacttctctaacttggagtttaaggtgaaagaaaccaattacgtggtttggaaatgtcacacttttcatctcttttttaaaaaaatttttaattcaggacagaaattgtatggatttagtgtaagtcttgggatctcacaagtgtcagtatttcactctcctccatatcttgatagcaataacttgaaataggatctcagtagctcaagcaatactgggctctgagagttggttaaaaattatttggctgagcgcctgttgctgagggaagaactaatctcgagcatatttttggagccaaataccaaattgtttgtgcttagcaacacagcaccaggcttgcccttcagaatgattctagaccaaatgccagaaatgctctggttctgactacagagttctattcacaaatgacaggaggcaagaggtcctcctcactttcagaagaaaggtcctttgctttcttagtcaatggtaggaaaaccattgtggttttcattgcattacataatttttaaggtgattacttcaataagaagtgctctgtgtatatgtgtgtttatagacgcattttttaaacactggagaatttctgaaagtagtacaaaccttgtaatgtcaagtagatgtgggaaaaagggagtttacaacattctctcctgacattgctctcctttggcatctgcatttttaaaatgttaaaaatgtttaaaaacgtgtgcttaacacttaatttggtgatagttgctgttaccaaggcaactctgtaactccacccagataaaaataaatcttgaagatgagtttctgtgtctctgagcaaatatttttgtgaatagtagaagcagagaaagttaaagatacctgagcttttgatctttactagttttatagatatgtttatagttatacatttttattcatacattttagataaataactttgtaaagcaattgattcttcttgtaaaaatcaagtatattcttaatagactgataaactttctttttttgagacagagtcttgctctattgcccaggctggaatacagtgccatgatcttggctcactgcaacctacctctgcctcctgggttcaagcaattctcctgcctcagcctcttgagtagctgagattacaggtgcatggtaccacaccccactaatttttgtattcttagtagagatggggttttgccattttggccaggctctgagaaactttttaaggtctcttttgcagccagctatttgtctaccttatttcattcttaatctcactagccaatattttttctgtttaagtgctttcagcaaatattaaatgcttgtgccttcagtcttatcctgtggaaacactggtaatgacaaaaacacatatttcaacctaatatacaatagaaacagaatgccagttattcatggaggagaagaatagacttctgtatttaaaataacattttgctctgtgttttaaaatcattcttccttcatcaattgtaagcatcttgactataatttatacacctaaagataaataattcagtagcaatgataactgaaaacaggacacatacaatgaactagctaaattaccatacattctcatccatttcaaaaatagctctgtacttttttcagattttgttagaagaatattcaatacaaatttttattcaatgaacacttcagatgtcaagattgttacccacatggacaacagtaacctaggtaaagattctgcagccaggcgtggtggctcacacctgtaatcccagcactttgggaggctgaggcgggcagatcatgaggtcaggagatcgagactatcctggctaacatggtgaaaccccatctctactaaaaatacaaaaaattagccaggtgtggtgtcatgtgcttgtagtcccagctgctcgggaggctaaggcaggagaatcgcttgaacccgggaggtggaggttgcggtgagccgagattgcaccactgcactccagcctgggtgacagagcgagactctgtctcaaaaaaaaaaaaaaaaaattttatacctgggctctgtgctcaccagcagaaggggtaacatggcttcttaggacaaccttacttgaccatttacttctttgacactaggggtattcttagatcagcaggtccttccctccacttatgcacatgaggctcacagagagtctgggaggcagggaatttatgattggaaacagtatactttttatctaagaaattattaatgtcactgcattcaagtgattaacaccatcaatatcttcaagactaaggggattacatgatgtgtaaaattagaaaactgtcatctactagtggctaggcactttaattatattaagcatgcaacaagagaactcttcaaatgaatccatctctcctctgtattatttccaacccttggatccccatctgtttctgcagacaacagctatgctgctgaatgtcttaatggtttgctgccccaactagcttcaagatactgcaggtcaagcatagcatcttactcttccctgcatctccagcacctctcagaatgttggtcacatagaagatgtttgctgaggagttgaataagaatatgtacaagggacacaattagcattgtttaaaaaagatgtaacaagatagggtaaaggaaagctttggaggataaatctttagaacaatcaataatatcttctcctctgttggttagttgcccttcaatctcagccactgaatcaaatacaacataattactattctgatatgttcttgaatcgaatatccaataataagatattcggatgcatagccatgtctaatatcaaagcccatgcttttcgctattattgtactccatacattagcttccaaatttatttgcaatccaaatattaaaagcaagtcataagcttagtatcgccaatgtgatactaagtatccacttactaaactttattttcaaaatgtggttttatctcagtttaatgaacacggcatgttttaatttacactttcatattatatagtaagggcgtggttacagatatgttaatttcctgtgctgcttcacaatgatggaacataatagcaaatgaaactgttaatttgcagatacccataggcctttggtgtctgaatagaaataaacacacctacaactgagagaggaagcatgtgaagcattccagtgaacagaggccatttattcagtcacagacacaggagaaaaacaacaattaaaaaaaaatctctgatgaaaagttcataaaaagttcactcagtttaagcatatgtcctataactacttaaaatagagttcttcttaaatatcattctttgctgtttttagatttcttctgcctgtatcaaattaatagaacacagcatacttttaatttgctctggtttcttagtggggcatttattaaacacattaaaacaatagtctcagggttttactgctgatgttaaagttctgctttcctacttaccaactgtgtcatcttaaggcacatactttgcctctctctcaaatctcccaaatggagaatgataagaatacgtacctcaattaaagaagctataacaagtagaatgtttggaaaagtgccgggtacaccataagcccactatgagtattggattgtattacctctgaaagctgcagaatggaattctcaaagttatatgtccctaaaatcctcttaagtgacagaaatggagaaattagcagtctgtctaagagagcttttctagagtctgggcatatgtttttaggacaagacagttcagcttcagcttaaaatgagagagcacgtctgtgtccttactcctgggtgccaggtttcttgtccccatcttaagacaaataattttggtggagaagaggcagtctctttgatttcgctctaaaaaccttttctggaggaggtagacactctccacccccgttttgagactcatgcagctgaggatgactggctgagtacaagcaattgttccttctaagcagtttcaattcttataacttgtggagatattcttaagtccaggggattttgtgtatggtggatttttattacaaagtcctgtacttcataggaacaaaataattcaaagtcaggaaccagatcaaagccacaactcagatatggcaccttgagaagttcatttgtatttcacttgcataaaaaccctcaccactgctatctgattttcacaaatcattcaacagctatccatgaagcacccactgtgtgtctggtctctgtgtcagtccctggcttcatgtgtctttccttctgtaccctgactccccaactcatgaacacatgaagtaaaaaaatgaaaatctttttctgacctctcttcaaaatcacttttttcaaaacaaacacctctcacctgctcatcctccagccagtaaatcacaggggcctagaaatgtcacttacaaatattttctgattctgtccctcccttcaagcttgccaacattatcacagtttagggcctgctcatctttcccccaatctccaattagatctctccacaatgcaattctgcacattccctgttacaacccttcaattatttcccagcccatccaaaataaaatctaagcctcttactaacacattcaggaactctgtggcctacggttttctacagactaattttccagcagttgacttccagtgcaagtgaaaacctagtgtcatgcctgcatgatagataaatttgaagctgaagagcccaaatgtatagaccatgccatgaaaggtttatagtcatgacacagtggccctatagtacagtgcttgaagctggctctctactgtcagacagaccacttgccagccatgagacctggggcaaaatgccttaatttttatgtgcctcaagttctcatgtgagatgagaataaaaattacccctatttcataagatttgataaagtgtttagcataatacctcataacaattgcaattcagtggtggttattattataaagaaaagatgattaactttatcttaatgtttaacttgttctgatagttattgatctatagctttgatatggaggtttgagaatgacctggaaagaattggccacaatgattgaagatagtgatacaagaataaaagatgactgcaaaatgtaaacctgcaataacagaaagaatgaagtcactggtctcatgggaactgatatgggagaaaaaaacagatcaaaaggctattcatgttttgggcctctttgtcaaaatggaaatgagaaactggggaataaaaattaaagcaattctagcatctggttttaacataattcttatccctaaaaagaatctataagaaactcccaaaatgacaggcagccgtgggtagcattgcatttcaagtaatcttttaattgttaaaatttaagtttccaacatgaacataaaattttcaacctaaaagaaatgagttccaaatctgagacaagtgaaaaaggataaagcctactagggggtaaattccatctctttagagatctagtacccaatttagcaatgtccaatcaagcctttaactactacatttgaacacctcatcatttcaaaatgttacttaatgatgccaattaactgtacaatgtctctgcatagcacatagccctaaaatgatttgtgcaatgttactgtcagtaaaactgaactacagggaatgctcatattctatgtcattatatacagaaatgcaatatcaataaagtgatatctgttggtattagaaaaaagtgaaaattttcatatctttctattttcttttttcctcaatgggatgctcttgttaaagatagctctgcatagtaaggtttgtataaacattatttagctaaagttaaaaggggtaacatactggttctagcacagatattaaaacaaattagtttgtaggtagggcagcaatcaattatattactaaccatagctttggtccttttatcctttcccatttgattttacacagtgggatgttaaaggttgaatgtctttggtatctataaacttaattgaaagctgttatttgtttgtttaagtctgttgatttttataatcataattttactcctatagatttcttgtaggagtactatatgaatttatgttgcactgaattttgttatgttatacaaattaataggcttttatttatggaaagctactattgatctgtcatttcttaaaaaattactaaaaagtgttaaaactttaaatgttggagagtttatattttaaaagttacatgctagaaaaacatgatgtctgagtatattagaagttatagataattcatctgtcaactataaaactctccaacactgcctttctttaatgaataatatgaaatttagcagtgaaaatgtgacaatgtacaatcctaaataaatcaacaaatttagagatgtacctctaaaaccattgtaaattcaacagtgtaattttccattggactttcacttattcattcattaaacaaatgtttgtgagtgcctgcaatgtatgagacattgtactgaagctaggcagtgtgagttatcatatgggattatcctttaaatacttctgagggcaaaaaaaaaaaaaaaaagaagagaaaaggtgtgaggaaagataaagggttaattcattaaaaaataacacttgaggactgttttctttgcaaggcataaagttatcaccctttcaaacagtagatatttcacatttaggatgcgagactccagttccaacaaagctcattgcacagctgctaccctgattaaactgctacatgaactctgagcaatgtagcatggtagccgcatgcttctgcttgcatgatggttaattccttccattctcattagtgattttctgagctttgaaattctgatggtacctaggatataaagcatatttatctaactgaaaaacagataattagatgtaacataaaatatgaatggctttgtcactttattgtagcagagaatgaatgtgggataaattaaagctgatgctagaacatatgcctattttttagctggaaaatttcaagatttatgtactttgggcttgagaaagaaatggagtttattttttatgcactgacatctctttttttttttttttggaagagctctcttaggaatgaatggtatgtaaatacagtaggaatgtaattatagattttcctgacccagttcctaaataatagatatcatttcagaagtgccccaatacctgaccttttgctccaagccatatcaaagcacacatctagtctacttttcactctcattcctagccactatgacaatactattcagataaaacttctagtcctctacttatgtgactcataccaacttgaccttacgatagtgactgggggtgcatatctaggttcatgctgtttgtccattattatggttttgtgagaaaaggcaaaatttctaggtaaagtgttatgaggacgaataatccaccaggcaaccaactgaccctttcatttgccatcttgtcacttcaaacagctctccagaacctgcagccagcacagaccaaagtcaggtttgtctcctcttctgttgatgaacaaaggttgattccatatcgtggctattgtgaatagtggcagtaaacatggcagtattgtatgaaaatatcacagatagcccttaaatatgtgcaactatgatgatctatcaaaattaaaaattaaaatttatttttaaaagttcagttagaaagcttgtagttcctggcaaactactacctttctcggcaaaagaatttgatatctcttaaatattttctgcctaatgctgatagattgtatttacatattccattaatgcaataaataaaattacaccaaaacatcagcattatttatttccaggggcatctctcaaaataaattcctccaaaattcacaaaaccaaaaccaatgtgaaattgtactcagggatgcaaatgtagcccagtgaagcatttgcccacttgtttggtattattgaagcacaattagaaaaatgtgcaatgtatgcccaaaaattctataataagggccaggcgcggtggctcacacctgtaatctcagcattttgggaggccaaggtgggcaaatcatgaggtcaggagatcgagaccatcctagctaacaccatgaaacccagtctttactaaaaatacaaaaaattggcccagacgtggtggcgggatcctgtagtcccagctactcgggaggctgaggcaggagaatggcatgaacccaggaggcagagtttgcactgagcctactctccagcctgaacgacagagcgagaccccatctcaaaaaaaaaaaccataataagaactttttaatatactatattataatgtaaaaagactagatgtcaaacaaattaggtgatgggaaggaattgagggagaattttagactaagcaattgagcagcacctgtttttcaccacaaatctgttacatgtattgctcaattgtgctgaatccatattgggtcctggtggctatgtaatagtctctttcttggataaatgtttgtcctctcttatggtttactaatggtgtacagaacagcattgaatagtggttatttcctatgacttcctagatatctctctcataatcctgaatgttttaaagatcattcttagatagagtacagctagacacgaaccatagtggaaatcaggtagacaaaatttaaaaggagtcttaattgaaggtcattttattgtcctcagtattaatcttacttaaaacaaacctgtcactgagcagaactcaaaacaccagagccctttgccaaatgtgattttttacaacaggagcgctggcagttgagaggagtattctgtcacacttgagagaattcgagtccctgaagatttatatgaatgcttagctattatcgaaccatctcttcacagatgacttagtaaatgtctgcctttgcatcagataatggcttacaagttaatctcctcttgctccctgttacacacatatacaccttcttcctaaacagctcataaggtgaaagaaagactcagatttctgactatgtaattgataatatcacacggactgcctgctcatcatctgctagtcacattggcagagttgacagttttggagacactgaagacagtgcatatattaggaaataagcagtttcctgatataaattttcttgtagtttataaattacatagcatttattattccctcatattttataacatttaataatagaactgacacatatattcattttaaactcaattgtgtataataactatcatagcaacccttcagtgcctaaatatcaaatcttccattcctcccatgaacatcttgaatatataggtactgtggttagctccaacaagcttttggttagaattcattgcactgatacatagacattgttttaaaggcaatttcaaatcaaagctgtcagctgtgaatcaagcacaccttaaaaagtgacacatttgtcactagattccagcctctcaaattactgacacgcatcctttttatgtaaagatgacattgttctttcctgatatattgcattcctcatgaatttcttatagtcatagaatttttataaaccatttcagaatcgctgaaataaacatcaatatttttaactttttcattctgtcaaaaatattgtatgcagagatattgctgtaagtgtgtatacctgtgcttaagagactagggctgaagagaagtaatcaaccgaaccactggtgtaaatgtgcgtcacatttttagtgactagaaattgaaataattccaacaaatttatgtgctttgggcttgagaattcagactgccttaggctaagataaaaatcttttcctggtactatataccttcttttattgaatgactacctggctctttctattatatatgcagattttgtacctctggtcatctttgtaaatggtgcctaaaagatatttgaagaataagtgaccagcaataagaacaaatgtctatacaaaagcaccctttagttggatgtaattcactactttgagttgttaataacctctaaggatgacagtagctattagttgaataaaccattatgtctattattagaacactagatagtttataagtccaaacaatgcataaaatacctatctcatgttaccattgtttaggttaccagataattgttctgtccaattattccacttaattttttgcttgcccattagctaaatggcaagataaaatttgtcaaacgggggggaatgtattgaaaatgctagacaactacacttaaaatgaaaacaggccaggcgcggtggctcaggcctgtaatcccagcactttgggaggccaaggcgggtggatcacctgaggtcgggagttcaagaccagcttgaccaacatggagaaactccatctctactaaaaatacaaaattagccgggcatggtggcacatacctgtaatcccaactactggggaggctgaggcagaagaatcgtttgaacccaggaggcggtggttgcagtgagccgagattgtgccactgtattctagcctaggcaacatgagcgaaactccatctcaaaaaaaaaaaaaaaaagaaagaaaagaaaacaaatgcataatttgcaaatattatttttatattgtatgttatctagggcttctaaatgcattcttcttataagcctaggtttgcaataacattcatttagaattgagtaattttaaatataatattttataaaataaaatataataatttctcttaattctttgaaaatattaaattaaaagggggttgcaaactctgcattccacatttccatcccaacatttaattttagcaattttgtagtctgcctaaaatgcaatccatcatttactgtttagaaaatagggaatgtacacaaaggcctttcagctttccctgaactccataaaaatctttttgcttctttactgcccccctttgtcaggagttctgaggaactgttttttatcttaagtctcacaaagcatttaggagaatatttaaacttaaattcttttaaaacttatgttcaggacaaagtaacattgtatgcattggtgtcatatgtatttaaattttgaaatttttaatactggcaaaatgaggtttcaattttaatataaattatttaacaatcttaaatcattaaatatattacttaatatatttaatatatctaaacagtcacaattttcccatactaataatcataaaaaatcttacccaatggtcatatagatatacttaatggagttttgggggggtatttttgtatattaaaaaattcatatatttgccttacttagaagaactgattaaatgaaagtataatattaacaaacatattgttattttatatttgcatttgtgataattatatttgaaacgttcaagattttccaatgaatttcttttgcatttgcgtatttgtgcctttttattataaaaataggtggctttttagttccactgcataagtttcaacataggtctacaaatagtgcatctttttgaagttaatcattataatcacaaattgaagttgcctgagctccaattggagtctaaatggatgactgaatcttattattcgaaacccactgttgctacacaatatggccacacaagagagtacacaagacccgtctgattcagcctcagtgccataaatattttaatggtttcgttggaatctggaaatggagctcaccacaggagatgcttcttcctttgactctcattattatttcctttacaaattaattaataaaaacttagatgctaaattagcacttgatgaaaacttatatagccttgacattttgattctgtgagtgaataaaaatacttggagaaataaaaatcctaatcatgttcaggaatacccacaaggtaacaagtacatttttaaactttaaaaacatttattattcatgataaaacatgttgtgtgatttaaatataaatttttattatttgctttaacttatttccggattaaaaagtaaatgtttacctagctgttctaaatggtaatcctcatgattaaaacagcaatttgtcatatttcagttacaaatgatcttttattattagttatagaacataagtttcttcattgactgaggcgatgtttcaagtagataaatctgttaaaaaaattgtggtcatattctgttaaattctcataccaggcaatttgtttgatattcaggaaaaacctagccactgaccaaaaactctacctgccttctcagttgtatcctcttggacttaaaggggactgggaaagttataagatggttcatgatagtccatcaacatcccaagaacaaaaacagatgttgtactgacagcatcatatgatcatatgcatgtaagagcacattcatattgccaaatcagttggaatttttcacggttgaaagttaaatgaaatgcttagatgtatgagtcatcggagttaaagacaattacagccagatttatggctgtgctaaaataaagctagttagaaaacagaccaaattccatgacgataccaagtctgactaatgattcaccttaaatttcggagcaacatttatcctcacttgtttgtttatttgacaatgtgcccttatccattaagtaactaggaggaagggaaaagcactacgtgggtgagtgacaagacactgacactgatttgtgactttggataattcctggatgctgttatctgttttggcatagagatggatctgtaactgctaataattgccgactgtgaccatcccagaggccatttacttaacccaggtatttcagacctgacagcccgaggataaacacgatttccctccatcactaacttcatctgcagggcctaagcctccttcacagtctctccagtgatttattggcatctccaagggtatctcacatgtgctgaagaacaaatctgctcactttcatctgcttggttttcccttttgaaatctgctgctttaaaattactaagggaggaatcatgcctgctgctacccttgccagtgaccttgcagtttgtgccctgattgttccaattaccacaatcaaaacagaagcgtttgcagttactgcagtgctctctctgtggatgtcaggtctgactcagagagccaggctggggaacagccatttccactcttgtacctctgcaaaaggacttccatgttccgtaaacagactcccacctctcattttccccccaagcaaagcatcataaattagagagcatgtaacgggaaagaaaatccattagccatttgggttcagtcagacaagccagctcatggaaagtttatacaggaaggtcacatttcaattgagatcaggagggtgaaagggtccagctgtgtgatgagagagagaatgttcgggaatgtggaacagaggtatccaaggcagaacaaactcgtatatgaaggctttaagggtgtgcaaatctagcatattttatgacataaaagagtcctgattagctagaatatgatgaatgtgagaagaggtgaaggctggagataggaaaaattattccagatcttataagctatagtaagaaatttgcatattatatatagacttgtgggaagccattggattttgtaagaaggagattaacattatcttatttatgttatttgtgatttataaccccaaatgtgccagatacaaacaaaccaaaaataataataataataataagaagaagaacaacaacagcaatggaactgtggtgatggttttggtcacaaaatgcatatatatctatttttcacaatgcaaaaatatttcattatttcaaattttaacataaatgtgggtatgcatgagcttacaaatcttgaagtttattggggaatattggtgagcatggtttttattgcatggtcacaacttactaatgggaaacatctgaatacctattgagttaatgcatgcacatttttattttcctggaatactgagaaaaaggttgctacataatgtcttgatagcttctaagtcatggctcaaaagtgaatgtggaatctgctaatcggaatggactcagattcagccaagttctcaaaaacatttgctttcatagatgtcttcaagaaacaaggagtcttgaatttaaattgtgaagtgtctatcttagaatagagagatttaaaatctgactgtattttgtttaaaaaagcctatataactgtattatataaaattatttatactacagttaaaaaaagaatcccatcctatttgtgcctaaataagtgcctgcttgtagcatgaaaactatttgttgagggtccttagatcctcagagcatgctgtgaaagtaggtacaattgttctttctatataagcctcttaagataacagataattgccagaaatacagcacacagtacaaaattaccttgttttacttttgccacaaaaaacaatttcttttggctttgagcaataaagtccaatgatttttttcctttcaaaatatcttcctccctctccataagttttatatttattcacgaaggaatattccaatatcggatgtttttgtctgtgtctcttcctggaacaaatgttaattaatctctttgggtttgtatgtcaagtggaggggtggggattggggacaggtgatagttgtctagggagttaacttcatctctataggagagtggatagacgctgtatacgaaaagctcttgaaaagggaaatacagcagccacttcctcagggcttccatggtggtcagactccttgattgctttagattaactctggcttttgtccttcggaggccaccagattgggtggatagacattgtccttgctgttcttttgacctacctacttgtactttaggggaaaaaaatgcctgtaataggttaaatgctttctcaaagatcaccaaagtatataacacatggcaaatagacagagaaatgagacagtataatcagtataatttataaaagtaccttacagcaggatcccatgggatatgggttttttttaaaaaaaatctacctaatcttttcattgaactcctattcaggattcattatattgaatatggctcagagacctggaaaattgtttccacctttttaatttattcaccatcatttatggaagttttcaaggacgtttacttacctacctcagttaacagattgtactacttgggaagtctataaatatgagcttaaagcattttctgagttttaaaataatttagattgtgtagaatgttaaaactaaaagaggaaaaaattattcagttcctcagttgaacctagcaatttatcttttcacagtgtgctcaagtatagtttttgaaaagtaaagaagatggtttttatacaaacataaacacatttcaaagattttattcaactaattaattagtagtggagccaataagctggtaagactggtttaaaggaatatctgaggaataaagatttatagaaacagtcaaagaaattctaaagagaattgactaatagatataaatctagtaaatatttgattaataatagcagtaacctatggaattatgttttctactgagcataaatgagcatgaatctctttgggtttgtatgtcaagtggaagggtggggattggggacaagtgatagttgtcaagggagttaacttcatctctataggagagtggatagatgctgtataagaaaagctcttgaaaagggaaataaagcagccactgcacatctgcacatataacctgtagatctgggggctctaataaaaaagttaatggcaatgtcaaaatctggtgttttatcttagataacttcatagtcattgattgagccccttaaaaataacatttaaaggacatgtagtcattctgtttctttattgccaagttttcagcaatttttctcatgagaatgagtgctaagaaacttttggtggagcgtggtggctcaagcctgcagtcttgcactttgggacgccaaggctggccaattacttgagatcagtagtttgagaccaccctggccaacatggtgaaaccttgtctctactaaaaatacaaaaaaaaaaaaaagtgggatgtggtggcatgcgcctgtaatcctggctactctggaggctgaggcacgagagtcacttgaacccgggaggcagaggttgcagtgagccgagatcctgccactgcactccagcctgggctacagagggagactccatctcaaacaaacaaacaaacaaaaaagaaacttttaaaatataacaatagagacattacataggcccacaaaaccacctccaaaaaagcattctatcacctgcaagaaagcatatatatatatctgcttttgtgtatatatatatatatatatatatctgcttttgtgtatatatatatacacacacacacacacatatgtgtgatatcagcatgtgtatttacacatatattttgtgcatgtatatttttaactaaaaatgtgctaggagttagatatgaactgattttggaggaggtgatatgctgtagagagagagaatgggagaatagcagtattataatctctctccattgtattcagtttttttctttgtctgaatttttaatagaagtcagccagaagatgttagtttctgggaaatgtgttgagatttacagtcaaatccagagagaactagaggcttatgagtaaataagtaaaggttatgcagagaaagtattctttttcctgtgtaaacttgaatattggccaggcgcggtggacacctgtaatccagcactttgggaggccaaggcgggtggatcgactgaggtcaggagttcatgaccagcctgtccaacatggtgaaacccattctctaccaaaaatacaaaaattagtgggtgtggtggcaggatcctgtaatcccagctactacggaggctgaggcaggagaattgctttaacctaggaggcggaggttgcagtgagctgagacagcgccattgcactatagctacggcgataagagtgagacttcatctaaaaaaaaaaaagaaaagaaaaccttgaatatttcttgtacttgtgttcaaatcatacagttatgaaagtttacccctagctgttacacttaaaatgtacttctgaaatatacagagagatgatacagactattaatgagttccactaaacttttaatggtttagaaaatacaaatattttcttatttttctggaattccagccattaatgtaaaacattggtttcaacataaataacacactggcatgcacatatgcctaagcatgggcccccacacatacagacattctgaaagaccactttttaaaaatattcagtaccgtatattgtgcattccttctttatccacatacttaagctgctgcaagcatcccattgataacaccagtaataaaagatgggaccatcagtaatgagatttgaaagccccttttgcaagaaagtaaggactagaaggtggaaatcactctgtcttagagtcatatggattggggctttgctagaagtgtgtgctctcagggaaagctgcctttttattttctccagagaaaagcctttttgtcagtaaaagaagatgtatcatccaatgcatatgtaaaattctaaacagcagataaaacaacattcactattaatctctgcaaaagaagatatattgaaaaaatcctcaagtgtccctctttgggtttctttgttatatattaaagcagttatctttagatgcatgagaatcacctgaagaccttatttttaaaattcagattcctgtcagttcactcccaaagattccgattcagtagttaagagacaaagcctaggaatgtgaatttacaatcaacacctcaggtgatagccatgcatgttcttaatgctctactactatctatgcataaaaggaagataaagttttaaaaacttgaaatgtggtataacagtttagtattgaataatatacatttttacttattgtaacaaattatgatatctacttggggcaacagtatcttttattttggatctgaatcctaattttggctaggtatcactgagggattcttagtctaaaacaattaaatggagttagtggttttttttagtaactcttgattttctgtttttttccattggcatcttacaaaatttattcattcatttttccctttttcacttggcattatttgttagacagtggacaaaagaactatagaaagtagagaagcatgtgatgttgtcctgctcttagattctcgcaactcaggagaggacattcgcttacaccaatcatctcaaaacatggcagtttatgctgaactcagtccaatgggagagcatttgactgagcacatagggagagaagttagctctgttgaaggataatcaacgaagaattcttaggaaaggtacagtcattcattgaatatttgctcggcacttactaggtgcatatgtgcactaagatctaaggatgggctgatgaagaacccaggtcccttttcttctagtggacatgcagactggcctaaaaaaaaaaaggtaactggaaaatggataaggaaactgagtcactcggtttatttattatcactcggtttatttgcttttgtttgtattttcattttgacacagcacagtgtcatcttaacgcatcctccaaagtgaaggatggggtggataacactttagttggcatttctgtagccaggagccaggatctttctcccataattgcattaacctgggaaggcaccctctaggtagatttgtatagcaccctggttaatcaattatcagtttacttcttgtctcactaagctttaacaccttacatttatgaagcagtgtaaatataactttagcatcttgatcacagcaagcacctgatttgtatttttttattagctcaagtgaaatcagatcagagaagtacattacaggtcataaaatatgtgcaaatttcataatgacctccttttaaaatgtgcaaaaataagattgttaaggcacattccagagccttggggggtgtgtgtgtgtgtgtgtgtgtgtgtgtgtgcgtgtgtgtgtgtgcttgtcttttgagaatatctgtatatcagaaaatttggctgagaagcaatcttcttcttagtggttctttttctcttttgaaaataaagtactaaaaatacttaaagatgcagaacagcaacctgttcccagtgagactctcgtttaattaatgtggtgatctatatagagaaaagggacaattgcaaaagtccctcaataattatctaaccacagtctttaggtaattacagcagaaagattttcaagacacaaaacaccctggaaaatttgacctcttattttgattcaggcctttcatttcttaaatattttctttaatgttgatgtttatgcttgacaaggtcagcctaatgccagatgaatccctggaactcaaaacattgctgaattcacagttgaaggattttaatataatataccagcttttaaaaatcctacagtgagaataacaggactgaataaaaaaattaagaaatgctcaggtagaaataaatagagaaatttagaaaaaaaataaaacgtattcaaaataagtattaagcattggcaaagaaaaaatagtagcagacaattacatgttccatttgtaaagatgattattaattagtggtcttgcaaaacattggagaaaatttgctgaaccatcacattcataaatattaaaaccacccattagtgaaaatctttttactaaacttcacaactgatagtcaaataatgttcagtttttctccattgcaataaaaaataaaggcttttgccttcagatcagtctctgggccttattaattcagtcagccagaagccacatggaaatattttgttttgttaaaagccagcttgccctcatgatcttttaaaatcttttaaaaatcttccatcagccctctccctgacttgaattatggcagtgctttctaaactggtaaactcaatctccttggtgtgcctcaagatagagtacataaaccctccttagaaattgagctctcaattctaaattgcactctccatgagagcaagcaagaatgctttgctttgtattaagtggtcacaatattaaatataaccatagacagcactgtattttctaaacaccttattttcttttaatgactgacataaattagatcataagtatacaaatgcatatctgttgtatttttcagcaccatgtgtttttttttcttttttctgagttattttcctgctttcggcagccttttctctcaggtgccttgtgatccacagtggtgtgtgttcacactaaccaaagcaatagtcttacctgccagaaatagctgtgacatttaaagagaggtccaggggaaggcacagtgcttaacatccaagtctgaagagctaatagtgaaattggggcatcagctacagagagatttaggggaagtaacaggcaggttaaatattttatggaaatgatttctgttctgtatatgattgcaattaacacatgtcaatctgtttcattaatttgttaactcatctattatgctatgccatgaagaaaataaaattggagttctttatttttttgagatggagtctcactctcttgcccaggctggagtgcagtggcaggatctcagctcactgcaatctccaccacccaggttcaagcgattcttctgcctcagccacctgagtaactgggactacaggtgcgtgcaaccatgcctggctaatttttgtatttttagtagagatggggtttcaccatgtgggccaggctggtcccaaactcctgacctcaagtgatccgcctgtcttggcctcccaaggtgctgggattacaggcgtgagccaccgcgccccgccacaaaactgaagttctaagcttcagtttagatgctcactaaatgcttgttttgcaatacctgactgtaactggcaggaatatgttttgaaagtcctcattttccaggtatgcagatgaaatataggggcattatctactatgtcaaattataatgatttatcagtggcacatgaaagtcgcctcacatttcttaatcagtgatataccattatgtcatgccaccttttaatgtaatatgtttacatctttctttagatgtaagcattcatttagttcatcacggtggctttcacacttactccaagaacgctatgagttcctttgatgtgctcaagtctcctgccccagggagaaagggagtggtgagcaggaatcgctttaatctatttacacagatattttcttttccatttattttaaaggaattttttttaacttaatgagtatgcagtgacggtggtgatgatgatgatactaaggtttaaatgattagatagtcaaatctgggctggaattgtaatactgttttgacttttaatcttagagaagctccagtctgcttattttctgggcataaacacatgagaacaataacacagttctgttatctgaatgttgttatattttgtttgaaacattcagtgactttcaaatattgtatttgcctaagaaaattcaacagagtcagacattctcttccaggttaaatttggtgagtctgctaggaaaataaattttgtgcactggtcattctgatctagtggacgttctaataaaagcacctttgtgctgcctacgtcttcactttaaagataagatacctgggtactcgacaccaaattatagtttgagatctcaaaaatgggatagggaaaccacagctcaaaaacaaaaatactagcactggaaaagatagaactagtgaagatgaatcattctctagactttaaattcagagatatcaaaattaagaaaaagtaggaggaataaaaaaagagggtaagcaaaacaatataagtttgtatagcaagagggtataaagcaaatacaatatttttcagaaaaattaaataaaaatagatttacataacattgtttttaatctcaaagatcaaatttcaattttcatctcattttaaaacccatatgcacagtctcctttatatacatcagttgggtgtcaaagtgacttttttcttgtttccaaatacagttatttttaaaatttaattgtatgatttaggaatttgaaagcaagccagtttgcacacacatatgttattatatgtgtgctttagacttggtttttagttaatgtaacatgacagggccacctgagttatttgtttacaaactagctggaaagccaccctggaggagaaacctggcaacaaaatggtctgcagctttgttattgttatctataggattggatgccattattgctgtaaaatagttcacaagaactcagtctatgggaaagactcaaaaattctttgcctgttaaagaaaaatcaggatattggactggttagtttaactaaaaagtgatgatactcagattctgcttggattcactgcttctcagcagttgttttgtttctttctaattgatattttatttttcagagaacccattataaaactcttcttcttcccttaaaatcacaaccacacaacagcaattaaaacatgctttgacgtaagactgatatggttttaaacccagcttgactatcgaattttttactttaggcaaaacacctctgacatttatgtcttatcgtcagtaaaaaggggtgattaacagttttacaagattattcaataaataaatataaattcctccttttccttcctttcctttcttcatcttcagcatctgcatgccataagctcattttagttctctggactcatgttaacatgtcccacctttcccaaattaaacatcatctctgttattggctccattcttttcctctcatttgagacaattctttatcaaccaacaccctctctgctctgtattgtgaaactctgctcctactacattaacagtctcttggtttctttaaaaagaagacaaaacaattaaagaacagaagcaaaaaatctactcaaatccccaattgttaccctcaaaattaattgtcccacccctagctttctcattgcacaactctttgtcaaaatgttttctaccatcacagccttcaatgatctttctggttcctttatctcctgaagtctgacttctacctccatctttttctggactattcaacacactttgagaaaaaacatacttttgttaaacaggtatgcatccctgaagcataaaatacatagtactgaaagtgcacatgtgtggttcttcccattttttttacagcacttgaaactgacaagtagtagtaccaattacttagtaaaagacctttttcatttcatttctgaaatattgttattttcctttttcatcttccatctctgactacacctccaattttacctctttgctgccttccttcctaagaaagttcttcatgcaatgccatcttgtttttcttcacttgcctctttttctcactttaattttatgaactctgatgacttacctctgtagtgtaactactcaaaatatgtatttctgaagtctcaactccaatctcatattttcaacttatatttatggaggcatctcagactcaacctacctaaaaaatggcttatctgccctaaaatctactttgttctttttttctctactgctaataattatcttcctagttggtcaagctcaaaacctaatcatttttactccttgtccctgtgtcagctgtccacattcaagcagcgtatcatttctgcacatttttcaagcaagtcagtaactgccttttgtttgggactgtcttttcatatagtgaacagccttggaagatagaaatcatttctccttctaaaacaaaaggcaggtgtgcttgcagccttggatagaggtagtgcctctttctaaagcaaagggacatctttactggccattataaaatatccatgtttcctgagctctgcgttcctcttttctaatgcaacccactgagcatgtaggtgtcacctgagcttttctgtgggaattgcggcttgaggaatcagtgcaagaaaatcatgatactcttgctaatgctattaatgtgagtagtaaagttaattgtctctgacccagcactattgtgtctttgcccagcactcaaaagactggcaggcttgcaagtaggacaaaatgttagatttttcacagttcttctgcttataagtacttgttaaaaccaattaaaacacaacttgtagtttgcacctataattttgtagcatttgcttcttatctatgtcactaggatgtgcttagtgacagacccatctatcatctattactcaagtttttggctgtattcctaggcaacagagagaaggggaacaaacaagaggacctgtgcacagtttgagaaaggcaaaacaccgagcttaattgcagacttgaatgtagctagcaaacgaagtaaggcaaaaggttccttttttttttttttagatggagtctcactctgtcgccagtctggagtgcagtggtgctgtctcggctcactgcaacctccgcctcctgggttccagcgattcttctgcctcagcctcccgagtagctgggactacaggcatgtgccaccatgcccagctaacttttgtatttttagtagagacggagtttcaccacgttggccaggatggtctcaatctcttgaccttgtgatccgcccattcggcctcccaaagtgctgagattataggtgtgagcctccgttcccggccaaaagtttccattttttaaatagttgggtttttagtttcgattctttccaaaaaaaggttttcttaaaaaaataaaattagcaataagatgaaatataacaacaatataatcttattaagacaatatatgatatacatttatcaaaatacttatattttcaaaagtgcttaaaataatctagcacatagtagatgctcagtaaatatttgatattatgactgtgcatgggtcattataggctactttatgtatatcatttcatttagtacaacatcactctgaaaaatgttttattgttaccgtttttcagttgaaacatttacgttgctcaagatctcactggtaccatctactattaggtcagtctgccaccaaatctcatgctcttaaatgccctttttctcctgagcttccaacaaatagtgtactgtatataattgttgaagggaggggactgtgagacaaaatatttagagtgaatgtgtagccacaatttcagttcctcaacaaagtgataaaattaggaatcatcctcaatatatattcttccaacacacacacacacatacacacacacacacacacaaataccacaagcccacttgaatgcaccccacctacacattgcaaccatagagacaattgcagcattaaatacagaatattctgtgtgttgtttgtttgttctccctttgctacaaaaatcagaatttctactcaataaacagcaaagggagatacaaatgaaccaaattaaagaaggaaaaaatgttgaaaaaattatatacagaactatgtattgatttattgagagttcagtaatgtaatccagaaataatggatgccttaaaagtaattaaaagaatgcaaataaacatttagtgccaattaaagaaaaagaaatacaacattagacaaaataaaagatattcatttgatgcaatgaggaaataatcttttattcctctttaaattctctgtggaataaggcatggttataaataaataaacatctgccccatggacttaatggatcgttatattttattgcgataatcataatgaaattgttgggagggattagtatctctagtgtaatgctaagaaagataaagcctgtgcccaggcaaaagctttcttggttggtcaaaaggtttgaagacatttcaaactattctaaaacaaacaaacaagcaaacaaacaaaaaacatacaatgtctttgccacatatttaggaaacaaaatgaacaatttatttctgacaacctcatagtctttgttctgtcagaacaataatggaaaggtctaaaccagaaaatgctatgcattgaatttataataaactattttttcctgtaacaaaaaattgataaacttgatatttgcagatttaatgattatgtgtttaaaaaaaatctggtttttgcccttgcaaaaaatcatatatatacacatagatatgtatgtgtgtgtgtgcatagtatatatatatgtatatacatatatatacacacatttatatatataaacatttcctttaacctcctattttattccaataaaaatattggtattagagatagttctgatatttcatcatgaatagttaacattgcatttggaaaggattaatttttttgaaacgtaattttaccttaataagtagcccagcgtaatattttagtaattacacagatttttttttcaagacatttgacaactaatattgcataatagttaagagtgtgggctttggagccagacttcctatctctgttcattcactgataaaatggagacagtagtaacttcctcaaagagttgttttttaagatcaaataatgcatataaaactcttgaaatggtaccaaatacagagtaagcaccaaataaacattaactgttattgttattccatgtccgaataacacagaaaagtaagaattttaatatttcatttgaatgaccttttaaggatacacctagcccattatctttcttgataatcttgtaagatgattccttttttatctccgatctgttgaggcatggatagaggttttcagagaaaacattttctaggtaactgaaagaaagtagcaacaacaaactgtgacaaaacttaacaatgagagaatttacaagatagaataattgcaactccttttgaaatcaaccactatggtcctctggctgggatagctaagcaaagatattccagcctgaaggttgagatctacttgaagagttttctatccagattgtgagggcccctcaaacttcacttagtatctgtttctattagtatggaaacttctggaaccttgtggtatcacattcacttgactactttattcctgctctagctatcttaaagcctttcttaatcttttatcttttagagaagatacttctaggttttaaatccaccgatcttgaagctattgccttcactctctgcttcagagcccatccttttgtatatgagtagtttgttttgcctaaagtactttctcccagtcagattttaagtccagtttctcatctgtttttgagagcaaactcctgggccttggctcactaacatcttgacagcatatttcttctttcctatgggcttttcagcattccctgggtttttctaaaatatgaaagcagactctttatctcttactttgtcaaagcctaccctccccactgatttctcacccagttgctagttttaagacctgcctctggccgggcgcagtggctcacgcctgtaatcccagcactttgggaggccaaggtaggtggatcacgaggtcaggagatcgagaccatcctggctaacacagtgaaaccctgtctctactaaaattacaaaaaaattagccaggcgtggtggtgagcgcctgtagtcccagctactcgggaggctgaagcaggagaatggcgtgatcccgtgaggcagagcttgcagtgagctgagatcgcgccactgcactccagcctgggcgacagagcgagactctgtctcaaaaaaaaaaaaaaaaaaaaaaaaaaaaaaagacctgcctccaaatatcattgtatttgcaaacatgaaatgacttattgattctgagctcagcacaagagcaaacctttctcagcttgacccatcttcacatcgttaatgtcttattcagtcactacccaaggggctgaccttcaagattctaatccatgaaagcttaaaatagtaaacaaatttgaatatagtttaacatacataataaattttatttctagaagaggaggatcagcccttagacatgaaaagtaaaaatagtttattcccagatttccctttgtgcattagtatattcaaccgagtctatccaagtaacaggacaaaaaaagctggcagttgttgctgcgctgtgaagtcttattaggtgagtcagctaattatatggcactaccataaatacagcaggcactgccctgcttgttaggcttgccaaggaaaataaggatttaaagcagcatactacctctttgctatataatgacattttcttcttaaaaatgattttgcaccaattcctgatttatccaccaattattttttaatttatggttgaatgtatttaaacctgaattcagagataaaactagtaaatagctccccaaaataaccccaaatatatttaatatattagctttactctctcctccactgccaaacctttaaaaactgaaataaattgtttttatttcatcttttctctttttctctctctctaaggtgattgccaagactaaagaaacagctagaagggcaaaagacaagaaaatcagtaagatagtaacagattatccaaagtagagcacggctcaggtgcagtggctcatgcctgtaatcccagcactttcggaggctgacgcaggaggatcacttgagtccaggagtttgagaccagcctgggcaacataatgaaacttcatctctataaaaaaaaaaaatttaaatagccgagcatggtggtgtaagcctatagtcccagctatttgggaggctgaggctggaggatcacttgggcccaggagttggagactacagtgagctatgattgtatcactgcattacagcctgggcaatagggcaagaccctgcctctaaacaaaagataaacaaagtagagcataaatggcttctaaatatatgttatttatgtgtaagactgggttctctaaaggtatcatttaattaaaatagatttgcattctcaatctgtaggtatggattatgtataatgtatttaagatatgacttacagcgttcaccaatgtgactattcccaagtgatccagatggctgatgacatagtaatttgtacatttgctgagacctgatctgagtaggtatgtaacataactgagggagagcaagtccatttgccgaaagaaagcctagcatatgacccaggagccacatcttcactcagccttgttgctaggtttggcttagcatatataatagcatagcatgtataatttatgacaaaaaattatactttgcactttttaattagaacattcaaaatgatctcaggaagtggcaccagagatcatcagtggtctactgtacttcgtgtgtatgtgtctgtgagtatgtatgtgtttgtgtgtgttcccacattctaaggcatgtcttttacaggttagtagaaaatgttgatagaaaattatagatttcaacatctaaaacacagtaggtcactacattgttaaaacttggaattttttatcttgttgtaaagtcaggccaaccaaacctaaaatactgctacattgaaatagtgcaaaatattcaaaatactatagttatagatttggtagtaggactgtaccagacctgtcactctatacaagacttatgccttgccctttcacttacctgttcccttttacatctatcttactagatgtaatgctataaattatatttctaatatattataatttatcatgtattataatgtatcaaatattacaaattatgttgcaactccccttacctttcgtctgcatattgcctcagaaagaacagatggatccaacagacttcaaccacaggcccttagtgacaaatagctcttaatgctgggcttgccactttgatgcatttctaaagttatagaatgttaaatgcaccaagtcctttggtcattttatttctaccttagatctaagccataactatactttcccaaaaattaaagtttgaattttaacttaaccatatataattggaaaaggaggttgggttcgttaagtgtaattttatcatgctttattatcctttgggcattggatacagcagaacatgccaatttctatggcttctcatgtgacagaatatacttactaggatgcaattaaatactcctcagagtatgtaaacaataaatgtaatcattacattatttttatattgttctttcttatgcataatagtaagactgaaaatatagtgttatttctgaaatatgcatattgttttgcttttgatgattaaataacattgtccaaagttttaggttttttgaaatcttatattttttaacaaaatatctagcctttccaaaacaagacctcaataattcgtttaagacccagagttgttcctctccacatagatctcttaaaaaggcagaggatttatgacctcaagagaaatcagagtatccaaagtttgctttaattcaatgttttaaaaataaaattccttagattttatcaaaaattgagattagtttgattttgaatcagatgccctttgctccccaccccaaaatggcattatgagcagactaggaattgataatagaaaattgaacatatgaaatatatctttaccttgctttttaacaaggtattcatgtctatcgccttcatttttaagtgcatcaataaaatacatggtaattctcttagtgaaatatactatctacactatgtacacactcccctgtctgaggtagagaagtagagaatattcacatttttgaaacgtctatgctatttttatttaaatacgagttctgggcttgatttcattttggaacacgggtgtgtgcttaagttgaacctttttttcctcttaagtcaaagttcttttttagtttcttcttttatctttttggctactatctctctccttcatcctcctggtgtgagttgttgagtgaaggtattaattccattatttgaggctaagtgacattgttcaataatgcagcaaaacaatggttctacccaaaatatcttcaagtgtaaaagcagtgggcaaaagagaaagtgcgcttctgctgctttgaatgtttaaggctgtgaaagttgatcacacaaattgggtcattcttgttatacccaactaaaacaatcaagaagcctgggaggaaaagcattcaagaaacatcacattgctccaaaagtgtaattttctacaagtccgcatgctgaggctgcctgttgtaacctgggaccaattttttctgtaactgctgaaaaaacttgctgcagctctaggactaattttgcccaccactgtcactcaccaattgaagcttactagctccccagaacctttctagtgccaatgaactttctcaaagagcagcgtgtatcatttctctttttcagaacacctccaacctcctctttgttctttgggtataccaaagaccaaccagccttgaatttcaatttttcttcccacataaaagttttaatttagaaatgtatctctacatttctaactttgacaaagcatagataccagataattgatgaaaccttgctattttaacgatcaccatggattacttcccagtgtcttcagataaccctcaacatttgccaacatttgatggacttcaaaatgagcatatcttttttaaaaaaaattattcacactgacagcaagtacattggtatactctatattaaattataccacagggtttacaaacaattggtgatgtcgggcagtggtttccaaggaacatacttaacaagacactcacaaggccctacaaacctgcatttttaacaagggccctagatgattctagaagagtgtggtttggaaagcaatttttgcctttattatgtgtcattttaaatatatttaaaattaaagttataagtcatagaattgaataaagataatttccttacagaaagtattactaggtatctaaatacaatatggttcaaaacaggaaatttaaaaagattatgtaaattctgtagttgtattcctaaagacagtagctgaaattttttcctacttctccttgtatcacttcccttttccttcactttcacttccctggaattgtacttcccaataagctattagcagtgaaggaagcttcgtctcatgatctgttttatagagcacttcagctgggacgagtacgaaatgataatcagttatatcagctattcaaccctacaggtttatttaaaaagaacttgaataagctttttagggagaaagaggtcagtctcagccatttctgtttcctaatatagcttttaagtctttccttattagcaatgagggtcattccattgtaattttttgataaccatttttctttctgtgtgtcaaatgcagatataagatactgaactgagtctatttcactgttcgtaaaacaatcccatttgaaaaaaaaaagtctacagctattccagggatagggcctagtagagagagaataaaaggtattttcttactatgtctctatatcctaccctgtaggttctcttattaagcatacaggcatataccaaaatccagacgtttttctcatttattttattgccctaacatattctgggttaatataatatcataatgaaaatttgagaaaaaattgattttttcaaaagtgtttaacatttgttatattggtagttttttttcttgtttgtggtaaaaataaatagaaggtgcacttcacaccttcaagtatgattatattttgaaaacaagtcatgaatactcataaaatgcaaattttaatgttctttttttgttacagccaaactatattaggcacagttgtaaattggagttgaaatttaatatttctttatagataacaatgtttttagaaataggtttatgaaacagtaaatatacaggtatagggataaaattgtgtctgatggtcatatgaagtgtttgttgttatattctccttggaatagctgccaaatattttagtatgcttaaaatctacgaatgtgatagagtcaacaaatttagatcacatattcagaaaaacatagttagagaactaactattgaaatgagcatacagcagtcttcctttatctacagggatacattctgaaacccccactaggacacctgaaattgcggatagtagcaaaccctacatatactgttttttccaatgcttatgtacctatgaaaaagtttaatttataaactaggcacagtaagagattaacaacaataactaataacaaaagagaacaattataataatatactgtaataaaagttatgtgggtatggtctcgctttctctttccctctctctctgtctctaaatatcttagtattttggggttgcaattggtggtgggcaactgaaaccatggaaaacaaaaccacggataaaaggagactactgtatatactttttaaaactgatgaaatattaaactcatgtttcttctatatcccacccatttcccccacccaaacctagatagatatcttatttgatctgtaaacatttaattaatttgtaaaagttaagaactttttgaagtaaaactgcaatatatcatcacacctaaagaaataaacaataattcttaaatatcaagtcagtgttcaaatttccccaactacctcatatgtgttttccatttgcttatgtagggttcccaatgagaatgaaataaagttcttaggttgcaattggctaatgctctctcacttctactttaagcggcaggttcccactaacttctttttagttgcaatttacttattgaaattagacgtattctttgtcttgtgtagtttctcacagtgcaaaatttgctgattgtagccactgttgtaagcaatgaacatgtttttcaccaccttatatttgctgtaagttgtcagtgatagttaaatgttaatcaaattcaaattcggatcacgtagggcttttctttttttgttttctttttctatttatatatttatttatttattttgagacggagtctcactccgtcaccaggctggagtgcaatggtgtgatctgggctcactgcaatctccacctcccgggttcaagtgattcccctggctcagtctcccgagtagctgggactataggagaaccaccacgcccggctaactttttgtattttagtagagatggggtttcaccatgttggccaggatgctatagatctcctgacctcaccgatcatgtaggacttcaattgtcgaacaaacgaacctttaatagcagttacaccattaggatgacctgatccaacatcgaggtcgtaaaccctattgtcgatttggactctagaataggattgtgctgtcatccctagtgtagcttgttcccacttgatgaagttattggatcagtgaacaatagcccacttaaactagtacagtcttagtttaagatggtgatgtgtatgtacttccatcagagggcacataatacagtaaatcctcacttaacttcatcaatagtttctggaaactgtgacttgaagcaaaacaacatataacaaaaccagttttaccattggctaattgatataagcaagaattaagtcctatggcaaatttctggacacaaaaacaccatcaaactcctaaataaagataaatcacttctgacattaaacattgaaattaatgtgagctatatatacgtttaagaaagattaatacaaacaagtcaaataacttacctaattatttcggtggaggccgcaggtggttggagcctatcctggcagctcagggagcaatatgggaacccaccccggacaggacgctgttccattactgcagggtgctcttgtacacacccactcacccaggctggaaccatgcagacacacacactcacctaacctacacatctgtgtacatccttcaaagttcagccaaataacatataaacaaatccagtaatatccatcagtcttagttccgtcataacaactcctttttgatcatcaaacaacaaacagggtaggtctgccatatttacttgtctggtccatatcaaaattttctaacaaattatattagaaaatcaaatctctgtcagtttcaaaatcatggaaaaaaatttgccttatttcccttatacttggatatcctaacagtaatctaaatattaatgagaaagttaatgatgtcgtttccttctccctgttgtaaagaaggttttgctgtcccgtttgatcactaagactaattgacactcagaaaaagcataggaaacttctcagcatcacaaaagctctgtcatctagagaagctaggacttgagctcaagtcctgtgacatggaaggccttgtgcctagccatcctgcagcagaggcgtatctaccaagaagtgaaacactacgaaaacagtatgtttactccacattttaaagtgaggtagtttggggtggttcatattttatttaatttatatattatttggattttttttagtttataaaaagggcattggcaagggcagaatgatctgtaagcttctctgcccacctaccataagcatgatctttagtgtgaccttttcttactgttagccattttcttatacttctgcgtccctgtcagtcacttccatgtgaagacatggggaagcttttttacatcagacatgttgttgaaaatcagccgcgttggctgagggattatttgatctctttctccaagtccctttaggctcacattgcctctctgttctttgaattttcacttacctttatcttcttataattactttgctgaaataaatgcaaagcaacaaaaggtatttagtgaagaataccaacaaagccatgaccatttcaggctgagttttgtagtattctttgtctaggaagagatacctagaaaaattttctgaccatgtatttgattattttccttcaatatgtatagtctcagtcttcaaatttcagaaaagaatttgtttcttcattgtcatttaaaattaatgtgttaaatatgtatgcttttacattataagtggttataaaagttaaacacttagaaaaaaagtcaaaataacatacatactatccaacaaaataactttcatattttattgtgttttcttccaaactttttacctttgcgtctgaattctgtgtaggttgtatctataatatagacaacactttatagcctgctaaatattataccataaataggtagttgttacataattctcaggtaatagtaatacaggtctttatcataatctactgagtagttgaatgataattttttttaagacaaggtctccctctgtcacccaggctagaatgcagtggcatgcacatggctcactgtagcctctacctcccaggctcaagtgatcctcctgcctcagcctcccaagtggctgggactgtaggcatgtgccaccatgcccagctatttatttgtatttttagtagagatggggtttcattgtaacagcccaggctggtcttgaactcctggactcaaatgatccacctgcctcagcctcccaaagtgctgaaatcacaggagtgaaccactgcacccagcaataattttttaactcttcattattcattgaacatttagttaacaattctaaaaattttgtttcctgctgtcattgatcttgtgaaaaatatctttggactatagctgtggattatttcctaaatagtaaattacttgagcaaaaagtttacatactttgagggttgataacccatgttgccgcaatgtttccccggaggcattgtggagtttagaatgccagtagtaatattaaggtgtgccattttcaagatccgtggccaacatccctatatgtaagatttttccaaaacatggttctgatttttaaaagtgaaaaatgctacttcatcatgttctttttgtgcttcttactttaaatattagaatgaagaaggagccccacaggaaggaattctggaagatatgcctgtggatcctgacaatgaggcttatgaaatgccttctgaggtaggagtccaagctgaatctttctaacaagacagtaccaaaaacctgtcattgtcacatttctctttcattagtgcttagtgagaatcatttgctctctacatgctcattacgtggacaacttgcaagttaagaatagtttttacatttttaaagggtccttaaaaaaaaagaggaggaggaagatgaagaagaggaagaaaggatgtaaaagaaatcatatgtagtccacatagcttaatatacttactacttgaccctttacaggaaaagtttactaacccctgcattagagaatatatttttagaaactttacattctaaaataaatttctaaatggaaagttagggaaatcaatggaatgccaaaggaaggttattattttttgccatacatgtccaatgggatgacgcatagtaaaataaaagttacccacacaagttatagaataaaaagataaatgcatgatttgcgacaattgatatattccagtataatgttttaaacaacacaatatgattgttaattttattttgattgaaaatgaaagtatctttaatagaaaatgtatcaaaagggaaattagaaaatactgttagatgaataaaactggcccaagaagaaacagtaaatctgaatagatttgtaacacagcgaatagattaaattagtaataaaaaaaaaaacctacctgcaaagaaaatcccaggccgagatggcatcactggtaaattctaccaaacatttaaagaggaattaatactaattagttaacaccaattaatatctcttacaaaacagaagaggagacatttcccaactaattttgtgagaccaatattaccctgataatcaaaaccaaatgaagatatcacaagaaaagaaactatataatggctccattaaaaattgagttcaagtatgttgtagtttggttatgtattattcctcacggcattattaaaaggcatgtcgaggatgggcacagcagttcacacctgtaatcccgcactttgtgagccaaagtggccaggttacttgaggccaggagttggagaccagtctggccaacatggtgaaaccccatctctactaaaaatacaaaaattagccgggcatggtggtacacgcctatggttccagctacttgggaggctgaggcatgagagtcacttgaacccaggaggcagaggttgcagtgagctgagatggcacccctgcactccaatcttggtaacagagcaagactgtctcacacagacacacgaaaggcatattgataataattcaacttatagaaattgagattaaattgtttgtttgcctaataagaatttccaatattttggggtcttttatgcaagacacagtactaaacacaatggaaaactatagagtaattgacattaccaggacataaggagtttacagtctggtaggtttgatgaaaaaaaatagaaattcattcattcatttcttcattatgattcctttaacaaacataattgattgtcttcgatgtaccaggcatcacaggagcaaaaatatataagacatactaaaaagtaaaacattttaaagatctgtttcaatcaatcaggagaagttttattgaggaggtaatgttgatctgggtgggaaaaggtaagagatatagtaggtcaaaacaaacagaggacattctggcacaagggaatatcagaagcaaaggcatgtatgtctgagcatgcaaatggatatgtctgagaacagtgaataattatgactcaagcttaggaacaaggaaaatggtgatagattgaatttgcagctatgggtcaaagacaagttatagagtattaggataatcttgtcatttcagcttgtattctattcagaaaacaacttgagttattgaagttatgcttatttgtttgtttttaagcagaatcctgatattattagagttgctctttaggaggaataatctgatccctttaattaaatccattaatatttgtgttgtggatgctatccagatactgtatggagagcttgaggtttgaaatacaagtaataattgaagccatagatgaagacgaaattttcaactgggagagtgaaagtagggaaaatgtatcttgccttcaaacatcttaatttccttctgagaattagagcatcttagtctggaaaaggctttatagacagcttgattttgttctcacattttacaggtgaagaaactgagaaccagacagtccaacttatttgtcctaccaaactaggtatatgatcattaaatggtgcatccggatcagaacctagatattttaactctgactactactgtaattcacttttatatcagacaagaaagacacaactattaaaaataagataatatttgctgcagaatatttgcaaaaacattgattgtaaattttagtgtaagtggggagccatttcctatctcattggctgtcagtgctgatgcgtaattgaaacttatactaacagtgtgtgctgtctttttgatttttctaatattaggaagggtatcaagactacgaacctgaagcctaagaaatatctttgctcccagtttcttgagatctgctgacagatgttccatcctgtacaagtgctcagttccaatgtgcccagtcatgacatttctcaaagtttttacagtgtatctcgaagtcttccatcagcagtgattgaagtatctgtacctgcccccactcagcatttcggtgcttccctttcactgaagtgaatacatggtagcagggtctttgtgtgctgtggattttgtggcttcaatctacgatgttaaaacaaattaaaaacacctaagtgactaccacttatttctaaatcctcactatttttttgttgctgttgttcagaagttgttagtgatttgctatcatatattataagatttttaggtgtcttttaatgatactgtctaagaataatgacgtattgtgaaatttgttaatatatataatacttaaaaatatgtgagcatgaaactatgcacctataaatactaaatatgaaattttaccattttgcgatgtgttttattcacttgtgtttgtatataaatggtgagaattaaaataaaacgttatctcattgcaaaaatattttatttttatcccatctcactttaataataaaaatcatgcttataagcaacatgaattaagaactgacacaaaggacaaaaatataaagttattaatagccatttgaagaaggaggaattttagaagaggtagagaaaatggaacattaaccctacactcggaattccctgaagcaacactgccagaagtgtgttttggtatgcactggttccttaagtggctgtgattaattattgaaagtggggtgttgaagaccccaactactattgtagagtggtctatttctcccttcaatcctgtcaatgtttgctttacgtattttggggaactgttgtttgatgtgtatgtgtttataattgttatacatttttaattgagccttttattaacatatattgttatttttgtctcgaaataattttttagttaaaatctattttgtctgatattggtgtgaatgctgtacctttctgacaataaataatattcgaccatgaataaaaaaaaaaaaaaagtgggttcccgggaactaagcagtgtagaagatgattttgactacaccctccttagagagccataagacacattagcacatattagcacattcaaggctctgagagaatgtggttaactttgtttaactcagcattcctcactttttttttttaatcatcagaaattctctctctctctctctctttttctctcgctctctttttttttttttttttacaggaaatgcctttaaacatcgttggaactaccagagtcaccttaaaggagatcaattctctagactgataaaaatttcatggcctcctttaaatgttgccaaatatatgaattctaggatttttccttaggaaaggtttttctctttcagggaagatctattaactccccatgggtgctgaaaataaacttgatggtgaaaaactctgtataaattaatttaaaaattatttggtttctctttttaattattctggggcatagtcatttctaaaagtcactagtagaaagtataatttcaagacagaatattctagacatgctagcagtttatatgtattcatgagtaatgtgatatatattgggcgctggtgaggaaggaaggaggaatgagtgactataaggatggttaccatagaaacttccttttttacctaattgaagagagactactacagagtgctaagctgcatgtgtcatcttacactagagagaaatggtaagtttcttgttttatttaagttatgtttaagcaaggaaaggatttgttattgaacagtatatttcaggaaggttagaaagtggcggttaggatatattttaaatctacctaaagcagcatattttaaaaatttaaaagtattggtattaaattaagaaatagaggacagaactagactgatagcagtgacctagaacaatttgagattaggaaagttgtgaccatgaatttaaggatttatgtggatacaaattctcctttaaagtgtttcttcccttaatatttatctgacggtaatttttgagcagtgaattactttatatatcttaatagtttatttgggaccaaacacttaaacaaaaagttctttaagtcatataagccttttcaggaagcttgtctcatattcactcccgagacattcacctgccaagtggcctgaggatcaatccagtcctaggtttattttgcagacttacattctcccaagttattcagcctcatatgactccacggtcggctttaccaaaacagttcagagtgcactttggcacacaattgggaacagaacaatctaatgtgtggtttggtattccaagtggggtctttttcagaatctctgcactagtgtgagatgcaaacatgtttcctcatctttctggcttatccagtatgtagctatttgtgacataataaatatatacatatatgaaaatatgtatttggtttctgcctccagttcttacaaagagctcctaaaacccttgtaatttcctgagtagtaggggtgctagggtcatcttttgttctaatatttggtctttgactctgctttctgacagagctccttagtccctgggtgagagtagcatcttctcttctaatgaagtgactcttgctgggttcctggatgggggctggtcaccagaaaggtcaagccatgataagaagcttgaagcttttggccccattcacatcttctggggacgggagagaagaggagctggagattgagttaataagcaacaatgcttccatgatgaagactccataaaaatccctaaaagacaggattcagagtgctttgaaataggtgaacatgcagaggtgctgggaattgtggtgtgtccagagaaggcatgcaagctccccacgcctcccccatacctttccctgtgcatctcttccatctggctgttcctgagttgtatccttttataacaaactggtaatctagtaagcaaactgttttcctgaagtctgtgaatcacactagcaaattatcaaacctgaggagagggccgtggagaccttggatttgtagacaagtcaaacagaagctatgagtaacatgaggactcattgcttgtgattgtcatcttcagtgggaaggggaaaaatcttgtaaaactgagtccttaacctgtgggtcaatgctaactccaggtagatagtgtccgatttgaattacgggacacccagttggtagccacaaagaatgggagaattgcttggtgtagaaaacacaccccacacacacatgtggtgtcagaaatgaaccggaaatattgtgttccggaaatattgagtgttgtgagtgagtgtatagaaagaaaaacagcgtttccttttcactactagattaaaacaaacacactcatgcattcacacatctcaaagacaactattaattctcaaagacagtgctgtctaaatccatactgaggaagaaaacacattttcttttcaaatctgtaaacctgacagactgcctctgtccacacactaatggaactctgtgtttcatctgaaatgtgttcatcccactttgttctttctgtcttgggcagggcaagagtgcaacagggctgacattttcatatgagctctgtccctgttattggctatactttagacaaattattatgtgtcaaatatagatgtaagtgatttatcaatattaagtcatttaattctcaaaacaaccttaataggttccattatgattctaattttacacataagccaaaggaggcacccacaggctagataactttcccacggccacacagctagtaagcggcagagccaagaggcccaacattacagcaccacagtctgtgctctcagccccttggccacatagtgtcagagtgaggacacacagctatttaagaaaacttccagaagtctaggaaatggggtgatagccccacttttctaggtataataattagatatttgtttttcttcaggtacctaaagaaaatttactagagtttgagcctttagtaagttttgctagtacatctgtttttcttcaggtgcctgaagacaaacatatacacacacacacacacacaaacacacacaaaatgtgtatctatatatatgtgtacacatatctctcatctctatatatatgtctctgtatatctatatatctataaacatatctatatctatagatacatatagagagatttctttttttttttttttgagatggagtcttgctcttgccacctaggctggagtgcaatggcacaatctcagttcactgcaacctccgcctcccaggttcaagcgattctcctgcctcagcctctcgagtaggtgggattacaggaacacaccaccttagcccgactaatttttgtatttttagtagagacagggttcaccacgttggccaggctggtctcaaactcctgacc

SEQ ID NO: 2 - DNA, 3215 bp, Homo Sapies
aggagaaggagaaggaggaggactaggaggaggaggacggcgacgaccagaaggggcccaagagagggggcgagcgaccgagcgccgcgacgcggaagtgaggtgcgtgcgggctgcagcgcagaccccggcccggcccctccgagagcgtcctgggcgctccctcacgccttgccttcaagccttctgcctttccaccctcgtgagcggagaactgggagtggccattcgacgacagtgtggtgtaaaggaattcattagccatggatgtattcatgaaaggactttcaaaggccaaggagggagttgtggctgctgctgagaaaaccaaacagggtgtggcagaagcagcaggaaagacaaaagagggtgttctctatgtaggctccaaaaccaaggagggagtggtgcatggtgtggcaacagtggctgagaagaccaaagagcaagtgacaaatgttggaggagcagtggtgacgggtgtgacagcagtagcccagaagacagtggagggagcagggagcattgcagcagccactggctttgtcaaaaaggaccagttgggcaagaatgaagaaggagccccacaggaaggaattctggaagatatgcctgtggatcctgacaatgaggcttatgaaatgccttctgaggaagggtatcaagactacgaacctgaagcctaagaaatatctttgctcccagtttcttgagatctgctgacagatgttccatcctgtacaagtgctcagttccaatgtgcccagtcatgacatttctcaaagtttttacagtgtatctcgaagtcttccatcagcagtgattgaagtatctgtacctgcccccactcagcatttcggtgcttccctttcactgaagtgaatacatggtagcagggtctttgtgtgctgtggattttgtggcttcaatctacgatgttaaaacaaattaaaaacacctaagtgactaccacttatttctaaatcctcactatttttttgttgctgttgttcagaagttgttagtgatttgctatcatatattataagatttttaggtgtcttttaatgatactgtctaagaataatgacgtattgtgaaatttgttaatatatataatacttaaaaatatgtgagcatgaaactatgcacctataaatactaaatatgaaattttaccattttgcgatgtgttttattcacttgtgtttgtatataaatggtgagaattaaaataaaacgttatctcattgcaaaaatattttatttttatcccatctcactttaataataaaaatcatgcttataagcaacatgaattaagaactgacacaaaggacaaaaatataaagttattaatagccatttgaagaaggaggaattttagaagaggtagagaaaatggaacattaaccctacactcggaattccctgaagcaacactgccagaagtgtgttttggtatgcactggttccttaagtggctgtgattaattattgaaagtggggtgttgaagaccccaactactattgtagagtggtctatttctcccttcaatcctgtcaatgtttgctttacgtattttggggaactgttgtttgatgtgtatgtgtttataattgttatacatttttaattgagccttttattaacatatattgttatttttgtctcgaaataattttttagttaaaatctattttgtctgatattggtgtgaatgctgtacctttctgacaataaataatattcgaccatgaataaaaaaaaaaaaaaagtgggttcccgggaactaagcagtgtagaagatgattttgactacaccctccttagagagccataagacacattagcacatattagcacattcaaggctctgagagaatgtggttaactttgtttaactcagcattcctcactttttttttttaatcatcagaaattctctctctctctctctctttttctctcgctctctttttttttttttttttacaggaaatgcctttaaacatcgttggaactaccagagtcaccttaaaggagatcaattctctagactgataaaaatttcatggcctcctttaaatgttgccaaatatatgaattctaggatttttccttaggaaaggtttttctctttcagggaagatctattaactccccatgggtgctgaaaataaacttgatggtgaaaaactctgtataaattaatttaaaaattatttggtttctctttttaattattctggggcatagtcatttctaaaagtcactagtagaaagtataatttcaagacagaatattctagacatgctagcagtttatatgtattcatgagtaatgtgatatatattgggcgctggtgaggaaggaaggaggaatgagtgactataaggatggttaccatagaaacttccttttttacctaattgaagagagactactacagagtgctaagctgcatgtgtcatcttacactagagagaaatggtaagtttcttgttttatttaagttatgtttaagcaaggaaaggatttgttattgaacagtatatttcaggaaggttagaaagtggcggttaggatatattttaaatctacctaaagcagcatattttaaaaatttaaaagtattggtattaaattaagaaatagaggacagaactagactgatagcagtgacctagaacaatttgagattaggaaagttgtgaccatgaatttaaggatttatgtggatacaaattctcctttaaagtgtttcttcccttaatatttatctgacggtaatttttgagcagtgaattactttatatatcttaatagtttatttgggaccaaacacttaaacaaaaagttctttaagtcatataagccttttcaggaagcttgtctcatattcactcccgagacattcacctgccaagtggcctgaggatcaatccagtcctaggtttattttgcagacttacattctcccaagttattcagcctcatatgactccacggtcggctttaccaaaacagttcagagtgcactttggcacacaattgggaacagaacaatctaatgtgtggtttggtattccaagtggggtctttttcagaatctctgcactagtgtgagatgcaaacatgtttcctcatctttctggcttatccagtatgtagctatttgtgacataataaatatatacatatatgaaaata

SEQ ID NO: 3 - DNA, 3211 bp, Homo Sapiens
gccattcgacgacaggttagcgggtttgcctcccactcccccagcctcgcgtcgccggctcacagcggcctcctctggggacagtcccccccgggtgccgcctccgcccttcctgtgcgctccttttccttcttctttcctattaaatattatttgggaattgtttaaattttttttttaaaaaaagagagaggcggggaggagtcggagttgtggagaagcagagggactcagtgtggtgtaaaggaattcattagccatggatgtattcatgaaaggactttcaaaggccaaggagggagttgtggctgctgctgagaaaaccaaacagggtgtggcagaagcagcaggaaagacaaaagagggtgttctctatgtaggctccaaaaccaaggagggagtggtgcatggtgtggcaacagtggctgagaagaccaaagagcaagtgacaaatgttggaggagcagtggtgacgggtgtgacagcagtagcccagaagacagtggagggagcagggagcattgcagcagccactggctttgtcaaaaaggaccagttgggcaagaatgaagaaggagccccacaggaaggaattctggaagatatgcctgtggatcctgacaatgaggcttatgaaatgccttctgaggaagggtatcaagactacgaacctgaagcctaagaaatatctttgctcccagtttcttgagatctgctgacagatgttccatcctgtacaagtgctcagttccaatgtgcccagtcatgacatttctcaaagtttttacagtgtatctcgaagtcttccatcagcagtgattgaagtatctgtacctgcccccactcagcatttcggtgcttccctttcactgaagtgaatacatggtagcagggtctttgtgtgctgtggattttgtggcttcaatctacgatgttaaaacaaattaaaaacacctaagtgactaccacttatttctaaatcctcactatttttttgttgctgttgttcagaagttgttagtgatttgctatcatatattataagatttttaggtgtcttttaatgatactgtctaagaataatgacgtattgtgaaatttgttaatatatataatacttaaaaatatgtgagcatgaaactatgcacctataaatactaaatatgaaattttaccattttgcgatgtgttttattcacttgtgtttgtatataaatggtgagaattaaaataaaacgttatctcattgcaaaaatattttatttttatcccatctcactttaataataaaaatcatgcttataagcaacatgaattaagaactgacacaaaggacaaaaatataaagttattaatagccatttgaagaaggaggaattttagaagaggtagagaaaatggaacattaaccctacactcggaattccctgaagcaacactgccagaagtgtgttttggtatgcactggttccttaagtggctgtgattaattattgaaagtggggtgttgaagaccccaactactattgtagagtggtctatttctcccttcaatcctgtcaatgtttgctttacgtattttggggaactgttgtttgatgtgtatgtgtttataattgttatacatttttaattgagccttttattaacatatattgttatttttgtctcgaaataattttttagttaaaatctattttgtctgatattggtgtgaatgctgtacctttctgacaataaataatattcgaccatgaataaaaaaaaaaaaaaagtgggttcccgggaactaagcagtgtagaagatgattttgactacaccctccttagagagccataagacacattagcacatattagcacattcaaggctctgagagaatgtggttaactttgtttaactcagcattcctcactttttttttttaatcatcagaaattctctctctctctctctctttttctctcgctctctttttttttttttttttacaggaaatgcctttaaacatcgttggaactaccagagtcaccttaaaggagatcaattctctagactgataaaaatttcatggcctcctttaaatgttgccaaatatatgaattctaggatttttccttaggaaaggtttttctctttcagggaagatctattaactccccatgggtgctgaaaataaacttgatggtgaaaaactctgtataaattaatttaaaaattatttggtttctctttttaattattctggggcatagtcatttctaaaagtcactagtagaaagtataatttcaagacagaatattctagacatgctagcagtttatatgtattcatgagtaatgtgatatatattgggcgctggtgaggaaggaaggaggaatgagtgactataaggatggttaccatagaaacttccttttttacctaattgaagagagactactacagagtgctaagctgcatgtgtcatcttacactagagagaaatggtaagtttcttgttttatttaagttatgtttaagcaaggaaaggatttgttattgaacagtatatttcaggaaggttagaaagtggcggttaggatatattttaaatctacctaaagcagcatattttaaaaatttaaaagtattggtattaaattaagaaatagaggacagaactagactgatagcagtgacctagaacaatttgagattaggaaagttgtgaccatgaatttaaggatttatgtggatacaaattctcctttaaagtgtttcttcccttaatatttatctgacggtaatttttgagcagtgaattactttatatatcttaatagtttatttgggaccaaacacttaaacaaaaagttctttaagtcatataagccttttcaggaagcttgtctcatattcactcccgagacattcacctgccaagtggcctgaggatcaatccagtcctaggtttattttgcagacttacattctcccaagttattcagcctcatatgactccacggtcggctttaccaaaacagttcagagtgcactttggcacacaattgggaacagaacaatctaatgtgtggtttggtattccaagtggggtctttttcagaatctctgcactagtgtgagatgcaaacatgtttcctcatctttctggcttatccagtatgtagctatttgtgacataataaatatatacatatatgaaaata

SEQ ID NO: 4 - DNA, 3022 bp, Homo Sapiens
attctggtgtgatccaggaacagctgtcttccagctctgaaagagtgtggtgtaaaggaattcattagccatggatgtattcatgaaaggactttcaaaggccaaggagggagttgtggctgctgctgagaaaaccaaacagggtgtggcagaagcagcaggaaagacaaaagagggtgttctctatgtaggctccaaaaccaaggagggagtggtgcatggtgtggcaacagtggctgagaagaccaaagagcaagtgacaaatgttggaggagcagtggtgacgggtgtgacagcagtagcccagaagacagtggagggagcagggagcattgcagcagccactggctttgtcaaaaaggaccagttgggcaagaatgaagaaggagccccacaggaaggaattctggaagatatgcctgtggatcctgacaatgaggcttatgaaatgccttctgaggaagggtatcaagactacgaacctgaagcctaagaaatatctttgctcccagtttcttgagatctgctgacagatgttccatcctgtacaagtgctcagttccaatgtgcccagtcatgacatttctcaaagtttttacagtgtatctcgaagtcttccatcagcagtgattgaagtatctgtacctgcccccactcagcatttcggtgcttccctttcactgaagtgaatacatggtagcagggtctttgtgtgctgtggattttgtggcttcaatctacgatgttaaaacaaattaaaaacacctaagtgactaccacttatttctaaatcctcactatttttttgttgctgttgttcagaagttgttagtgatttgctatcatatattataagatttttaggtgtcttttaatgatactgtctaagaataatgacgtattgtgaaatttgttaatatatataatacttaaaaatatgtgagcatgaaactatgcacctataaatactaaatatgaaattttaccattttgcgatgtgttttattcacttgtgtttgtatataaatggtgagaattaaaataaaacgttatctcattgcaaaaatattttatttttatcccatctcactttaataataaaaatcatgcttataagcaacatgaattaagaactgacacaaaggacaaaaatataaagttattaatagccatttgaagaaggaggaattttagaagaggtagagaaaatggaacattaaccctacactcggaattccctgaagcaacactgccagaagtgtgttttggtatgcactggttccttaagtggctgtgattaattattgaaagtggggtgttgaagaccccaactactattgtagagtggtctatttctcccttcaatcctgtcaatgtttgctttacgtattttggggaactgttgtttgatgtgtatgtgtttataattgttatacatttttaattgagccttttattaacatatattgttatttttgtctcgaaataattttttagttaaaatctattttgtctgatattggtgtgaatgctgtacctttctgacaataaataatattcgaccatgaataaaaaaaaaaaaaaagtgggttcccgggaactaagcagtgtagaagatgattttgactacaccctccttagagagccataagacacattagcacatattagcacattcaaggctctgagagaatgtggttaactttgtttaactcagcattcctcactttttttttttaatcatcagaaattctctctctctctctctctttttctctcgctctctttttttttttttttttacaggaaatgcctttaaacatcgttggaactaccagagtcaccttaaaggagatcaattctctagactgataaaaatttcatggcctcctttaaatgttgccaaatatatgaattctaggatttttccttaggaaaggtttttctctttcagggaagatctattaactccccatgggtgctgaaaataaacttgatggtgaaaaactctgtataaattaatttaaaaattatttggtttctctttttaattattctggggcatagtcatttctaaaagtcactagtagaaagtataatttcaagacagaatattctagacatgctagcagtttatatgtattcatgagtaatgtgatatatattgggcgctggtgaggaaggaaggaggaatgagtgactataaggatggttaccatagaaacttccttttttacctaattgaagagagactactacagagtgctaagctgcatgtgtcatcttacactagagagaaatggtaagtttcttgttttatttaagttatgtttaagcaaggaaaggatttgttattgaacagtatatttcaggaaggttagaaagtggcggttaggatatattttaaatctacctaaagcagcatattttaaaaatttaaaagtattggtattaaattaagaaatagaggacagaactagactgatagcagtgacctagaacaatttgagattaggaaagttgtgaccatgaatttaaggatttatgtggatacaaattctcctttaaagtgtttcttcccttaatatttatctgacggtaatttttgagcagtgaattactttatatatcttaatagtttatttgggaccaaacacttaaacaaaaagttctttaagtcatataagccttttcaggaagcttgtctcatattcactcccgagacattcacctgccaagtggcctgaggatcaatccagtcctaggtttattttgcagacttacattctcccaagttattcagcctcatatgactccacggtcggctttaccaaaacagttcagagtgcactttggcacacaattgggaacagaacaatctaatgtgtggtttggtattccaagtggggtctttttcagaatctctgcactagtgtgagatgcaaacatgtttcctcatctttctggcttatccagtatgtagctatttgtgacataataaatatatacatatatgaaaata

SEQ ID NO: 5 - DNA, 3127 bp, Homo Sapiens
gccattcgacgacaggttagcgggtttgcctcccactcccccagcctcgcgtcgccggctcacagcggcctcctctggggacagtcccccccgggtgccgcctccgcccttcctgtgcgctccttttccttcttctttcctattaaatattatttgggaattgtttaaattttttttttaaaaaaagagagaggcggggaggagtcggagttgtggagaagcagagggactcagtgtggtgtaaaggaattcattagccatggatgtattcatgaaaggactttcaaaggccaaggagggagttgtggctgctgctgagaaaaccaaacagggtgtggcagaagcagcaggaaagacaaaagagggtgttctctatgtaggctccaaaaccaaggagggagtggtgcatggtgtggcaacagtggctgagaagaccaaagagcaagtgacaaatgttggaggagcagtggtgacgggtgtgacagcagtagcccagaagacagtggagggagcagggagcattgcagcagccactggctttgtcaaaaaggaccagttgggcaaggaagggtatcaagactacgaacctgaagcctaagaaatatctttgctcccagtttcttgagatctgctgacagatgttccatcctgtacaagtgctcagttccaatgtgcccagtcatgacatttctcaaagtttttacagtgtatctcgaagtcttccatcagcagtgattgaagtatctgtacctgcccccactcagcatttcggtgcttccctttcactgaagtgaatacatggtagcagggtctttgtgtgctgtggattttgtggcttcaatctacgatgttaaaacaaattaaaaacacctaagtgactaccacttatttctaaatcctcactatttttttgttgctgttgttcagaagttgttagtgatttgctatcatatattataagatttttaggtgtcttttaatgatactgtctaagaataatgacgtattgtgaaatttgttaatatatataatacttaaaaatatgtgagcatgaaactatgcacctataaatactaaatatgaaattttaccattttgcgatgtgttttattcacttgtgtttgtatataaatggtgagaattaaaataaaacgttatctcattgcaaaaatattttatttttatcccatctcactttaataataaaaatcatgcttataagcaacatgaattaagaactgacacaaaggacaaaaatataaagttattaatagccatttgaagaaggaggaattttagaagaggtagagaaaatggaacattaaccctacactcggaattccctgaagcaacactgccagaagtgtgttttggtatgcactggttccttaagtggctgtgattaattattgaaagtggggtgttgaagaccccaactactattgtagagtggtctatttctcccttcaatcctgtcaatgtttgctttacgtattttggggaactgttgtttgatgtgtatgtgtttataattgttatacatttttaattgagccttttattaacatatattgttatttttgtctcgaaataattttttagttaaaatctattttgtctgatattggtgtgaatgctgtacctttctgacaataaataatattcgaccatgaataaaaaaaaaaaaaaagtgggttcccgggaactaagcagtgtagaagatgattttgactacaccctccttagagagccataagacacattagcacatattagcacattcaaggctctgagagaatgtggttaactttgtttaactcagcattcctcactttttttttttaatcatcagaaattctctctctctctctctctttttctctcgctctctttttttttttttttttacaggaaatgcctttaaacatcgttggaactaccagagtcaccttaaaggagatcaattctctagactgataaaaatttcatggcctcctttaaatgttgccaaatatatgaattctaggatttttccttaggaaaggtttttctctttcagggaagatctattaactccccatgggtgctgaaaataaacttgatggtgaaaaactctgtataaattaatttaaaaattatttggtttctctttttaattattctggggcatagtcatttctaaaagtcactagtagaaagtataatttcaagacagaatattctagacatgctagcagtttatatgtattcatgagtaatgtgatatatattgggcgctggtgaggaaggaaggaggaatgagtgactataaggatggttaccatagaaacttccttttttacctaattgaagagagactactacagagtgctaagctgcatgtgtcatcttacactagagagaaatggtaagtttcttgttttatttaagttatgtttaagcaaggaaaggatttgttattgaacagtatatttcaggaaggttagaaagtggcggttaggatatattttaaatctacctaaagcagcatattttaaaaatttaaaagtattggtattaaattaagaaatagaggacagaactagactgatagcagtgacctagaacaatttgagattaggaaagttgtgaccatgaatttaaggatttatgtggatacaaattctcctttaaagtgtttcttcccttaatatttatctgacggtaatttttgagcagtgaattactttatatatcttaatagtttatttgggaccaaacacttaaacaaaaagttctttaagtcatataagccttttcaggaagcttgtctcatattcactcccgagacattcacctgccaagtggcctgaggatcaatccagtcctaggtttattttgcagacttacattctcccaagttattcagcctcatatgactccacggtcggctttaccaaaacagttcagagtgcactttggcacacaattgggaacagaacaatctaatgtgtggtttggtattccaagtggggtctttttcagaatctctgcactagtgtgagatgcaaacatgtttcctcatctttctggcttatccagtatgtagctatttgtgacataataaatatatacatatatgaaaata

SEQ ID NO: 6 - protein, 140 aa, Homo Sapiens
MDVFMKGLSKAKEGVVAAAEKTKQGVAEAAGKTKEGVLYVGSKTKEGVVHGVATVAEKTKEQVTNVGGAVVTGVTAVAQKTVEGAGSIAAATGFVKKDQLGKNEEGAPQEGILEDMPVDPDNEAYEMPSEEGYQDYEPEA

SEQ ID NO: 7 - DNA, 18 bp, Artificial Sequence
  Antisense oligonucleotide
taacacattttcacctct

SEQ ID NO: 8 - DNA, 18 bp, Artificial Sequence
  Antisense Oligonucleotide
ttaacacattttcacctc

SEQ ID NO: 9 - DNA, 18 bp, Artificial Sequence
  Antisense Oligonucleotide
cttaacacattttcacct

SEQ ID NO: 10 - DNA, 19 bp, Artificial Sequence
  Antisense Oligonucleotide
gcttaacacattttcacct

SEQ ID NO: 11 - DNA, 18 bp, Artificial Sequence
  Antisense Oligonucleotide
gcttaacacattttcacc

SEQ ID NO: 12 - DNA, 19 bp, Artificial Sequence
  Antisense Oligonucleotide
cgcttaacacattttcacc

SEQ ID NO: 13 - DNA, 18 bp, Artificial Sequence
  Antisense Oligonucleotide
cgcttaacacattttcac

SEQ ID NO: 14 - DNA, 17 bp, Artificial Sequence
  Antisense Oligonucleotide
cgcttaacacattttca

SEQ ID NO: 15 - DNA, 18 bp, Artificial Sequence
  Antisense Oligonucleotide
tcgcttaacacattttca

SEQ ID NO: 16 - DNA, 17 bp, Artificial Sequence
  Antisense Oligonucleotide
tcgcttaacacattttc

SEQ ID NO: 17 - DNA, 18 bp, Artificial Sequence
  Antisense Oligonucleotide
atcgcttaacacattttc

SEQ ID NO: 18 - DNA, 17 bp, Artificial Sequence
  Antisense Oligonucleotide
catcgcttaacacattt

SEQ ID NO: 19 - DNA, 18 bp, Artificial Sequence
  Antisense Oligonucleotide
catcatatccaatttctt

SEQ ID NO: 20 - DNA, 19 bp, Artificial Sequence
  Antisense Oligonucleotide
ccatcatatccaatttctt

SEQ ID NO: 21 - DNA, 20 bp, Artificial Sequence
  Antisense Oligonucleotide
accatcatatccaatttctt

SEQ ID NO: 22 - DNA, 18 bp, Artificial Sequence
  Antisense Oligonucleotide
ccatcatatccaatttct

SEQ ID NO: 23 - DNA, 18 bp, Artificial Sequence
  Antisense Oligonucleotide
accatcatatccaatttc

SEQ ID NO: 24 - DNA, 18 bp, Artificial Sequence
  Antisense Oligonucleotide
gaccatcatatccaattt

SEQ ID NO: 25 - DNA, 16 bp, Artificial Sequence
  Antisense Oligonucleotide
agcgcacaggaagggc

SEQ ID NO: 26 - DNA, 20 bp, Artificial Sequence
  Antisense Oligonucleotide
aaggagcgcacaggaagggc

SEQ ID NO: 27 - DNA, 18 bp, Artificial Sequence
  Antisense Oligonucleotide
ggagcgcacaggaagggc

SEQ ID NO: 28 - skipped

SEQ ID NO: 29 - DNA, 18 bp, Artificial Sequence
  Antisense Oligonucleotide
aggagcgcacaggaaggg

SEQ ID NO: 30 - DNA, 20 bp, Artificial Sequence
  Antisense Oligonucleotide
aaaggagcgcacaggaaggg

SEQ ID NO: 31 - DNA, 16 bp, Artificial Sequence
  Antisense Oligonucleotide
ggagcgcacaggaagg

SEQ ID NO: 32 - DNA, 18 bp, Artificial Sequence
  Antisense Oligonucleotide
aaggagcgcacaggaagg

SEQ ID NO: 33 - DNA, 18 bp, Artificial Sequence
  Antisense Oligonucleotide
aaaggagcgcacaggaag

SEQ ID NO: 34 - DNA, 16 bp, Artificial Sequence
  Antisense Oligonucleotide
aggagcgcacaggaag

SEQ ID NO: 35 - DNA, 16 bp, Artificial Sequence
  Antisense Oligonucleotide
aaggagcgcacaggaa

SEQ ID NO: 36 - DNA, 16 bp, Artificial Sequence
  Antisense Oligonucleotide
aaaggagcgcacagga

SEQ ID NO: 37 - DNA, 19 bp, Artificial Sequence
  Antisense Oligonucleotide
acaattcccaaataatatt

SEQ ID NO: 38 - DNA, 20 bp, Artificial Sequence
  Antisense Oligonucleotide
aacaattcccaaataatatt

SEQ ID NO: 39 - DNA, 19 bp, Artificial Sequence
  Antisense Oligonucleotide
aacaattcccaaataatat

SEQ ID NO: 40 - DNA, 20 bp, Artificial Sequence
  Antisense Oligonucleotide
aaacaattcccaaataatat

SEQ ID NO: 41 - DNA, 18 bp, Artificial Sequence
  Antisense Oligonucleotide
aacaattcccaaataata

SEQ ID NO: 42 - DNA, 20 bp, Artificial Sequence
  Antisense Oligonucleotide
taaacaattcccaaataata

SEQ ID NO: 43 - DNA, 20 bp, Artificial Sequence
  Antisense Oligonucleotide
ttaaacaattcccaaataat

SEQ ID NO: 44 - DNA, 18 bp, Artificial Sequence
  Antisense Oligonucleotide
taaacaattcccaaataa

SEQ ID NO: 45 - DNA, 18 bp, Artificial Sequence
  Antisense Oligonucleotide
ttaaacaattcccaaata

SEQ ID NO: 46 - DNA, 18 bp, Artificial Sequence
  Antisense Oligonucleotide
tttaaacaattcccaaat

SEQ ID NO: 47 - DNA, 18 bp, Artificial Sequence
  Antisense Oligonucleotide
atttaaacaattcccaaa

SEQ ID NO: 48 - DNA, 18 bp, Artificial Sequence
  Antisense Oligonucleotide
aaaatttaaacaattccc

SEQ ID NO: 49 - DNA, 18 bp, Artificial Sequence
  Antisense Oligonucleotide
aaaaatttaaacaattcc

SEQ ID NO: 50 - DNA, 16 bp, Artificial Sequence
  Antisense Oligonucleotide
cacaactccgactcct

SEQ ID NO: 51 - DNA, 16 bp, Artificial Sequence
  Antisense Oligonucleotide
ccacaactccgactcc

SEQ ID NO: 52 - DNA, 16 bp, Artificial Sequence
  Antisense Oligonucleotide
tccacaactccgactc

SEQ ID NO: 53 - DNA, 16 bp, Artificial Sequence
  Antisense Oligonucleotide
ctccacaactccgact

SEQ ID NO: 54 - DNA, 16 bp, Artificial Sequence
  Antisense Oligonucleotide
cttctccacaactccg

SEQ ID NO: 55 - DNA, 18 bp, Artificial Sequence
  Antisense Oligonucleotide
aagggaatatcagaagca

SEQ ID NO: 56 - DNA, 18 bp, Artificial Sequence
  Antisense Oligonucleotide
cctaatctctcagccctt

SEQ ID NO: 57 - DNA, 16 bp, Artificial Sequence
  Antisense Oligonucleotide
cctaatctctcagccc

SEQ ID NO: 58 - DNA, 14 bp, Artificial Sequence
  Antisense Oligonucleotide
atcctcgcgtttcc

SEQ ID NO: 59 - DNA, 14 bp, Artificial Sequence
  Antisense Oligonucleotide
catcctcgcgtttc

SEQ ID NO: 60 - DNA, 19 bp, Artificial Sequence
  Antisense Oligonucleotide
gcacttccatttcattatt

SEQ ID NO: 61 - DNA, 18 bp, Artificial Sequence
  Antisense Oligonucleotide
cacttccatttcattatt

SEQ ID NO: 62 - DNA, 17 bp, Artificial Sequence
  Antisense Oligonucleotide
atttagcatctcccatc

SEQ ID NO: 63 - DNA, 18 bp, Artificial Sequence
  Antisense Oligonucleotide
tacactcatttaaccatt

SEQ ID NO: 64 - DNA, 19 bp, Artificial Sequence
  Antisense Oligonucleotide
gtacactcatttaaccatt

SEQ ID NO: 65 - DNA, 18 bp, Artificial Sequence
  Antisense Oligonucleotide
gtacactcatttaaccat

SEQ ID NO: 66 - DNA, 17 bp, Artificial Sequence
  Antisense Oligonucleotide
gtacactcatttaacca

SEQ ID NO: 67 - DNA, 18 bp, Artificial Sequence
  Antisense Oligonucleotide
tgtacactcatttaacca

SEQ ID NO: 68 - DNA, 17 bp, Artificial Sequence
  Antisense Oligonucleotide
tgtacactcatttaacc

SEQ ID NO: 69 - DNA, 16 bp, Artificial Sequence
  Antisense Oligonucleotide
gaaagtcctttcatga

SEQ ID NO: 70 - DNA, 16 bp, Artificial Sequence
  Antisense Oligonucleotide
tgaaagtcctttcatg

SEQ ID NO: 71 - DNA, 16 bp, Artificial Sequence
  Antisense Oligonucleotide
cctttgaaagtccttt

SEQ ID NO: 72 - DNA, 16 bp, Artificial Sequence
  Antisense Oligonucleotide
gcctttgaaagtcctt

SEQ ID NO: 73 - DNA, 16 bp, Artificial Sequence
  Antisense Oligonucleotide
ggcctttgaaagtcct

SEQ ID NO: 74 - DNA, 16 bp, Artificial Sequence
  Antisense Oligonucleotide
ttggcctttgaaagtc

SEQ ID NO: 75 - DNA, 16 bp, Artificial Sequence
  Antisense Oligonucleotide
agcagccacaactccc

SEQ ID NO: 76 - DNA, 20 bp, Artificial Sequence
  Antisense Oligonucleotide
tcaatttctttattctttta

SEQ ID NO: 77 - DNA, 20 bp, Artificial Sequence
  Antisense Oligonucleotide
atcaatttctttattctttt

SEQ ID NO: 78 - DNA, 19 bp, Artificial Sequence
  Antisense Oligonucleotide
catcaatttctttattctt

SEQ ID NO: 79 - DNA, 18 bp, Artificial Sequence
  Antisense Oligonucleotide
catcaatttctttattct

SEQ ID NO: 80 - DNA, 18 bp, Artificial Sequence
  Antisense Oligonucleotide
gcatcaatttctttattc

SEQ ID NO: 81 - DNA, 18 bp, Artificial Sequence
  Antisense Oligonucleotide
aagcatcaatttctttat

SEQ ID NO: 82 - DNA, 20 bp, Artificial Sequence
  Antisense Oligonucleotide
aatatttaaaattaactcat

SEQ ID NO: 83 - DNA, 19 bp, Artificial Sequence
  Antisense Oligonucleotide
aatatttaaaattaactca

SEQ ID NO: 84 - DNA, 20 bp, Artificial Sequence
  Antisense Oligonucleotide
acacttcataaaatatttaa

SEQ ID NO: 85 - DNA, 19 bp, Artificial Sequence
  Antisense Oligonucleotide
cacacttcataaaatattt

SEQ ID NO: 86 - DNA, 20 bp, Artificial Sequence
  Antisense Oligonucleotide
tcacacttcataaaatattt

SEQ ID NO: 87 - DNA, 19 bp, Artificial Sequence
  Antisense Oligonucleotide
tcacacttcataaaatatt

SEQ ID NO: 88 - DNA, 20 bp, Artificial Sequence
  Antisense Oligonucleotide
ttcacacttcataaaatatt

SEQ ID NO: 89 - DNA, 19 bp, Artificial Sequence
  Antisense Oligonucleotide
ttcacacttcataaaatat

SEQ ID NO: 90 - DNA, 20 bp, Artificial Sequence
  Antisense Oligonucleotide
attcacacttcataaaatat

SEQ ID NO: 91 - DNA, 19 bp, Artificial Sequence
  Antisense Oligonucleotide
attcacacttcataaaata

SEQ ID NO: 92 - DNA, 20 bp, Artificial Sequence
  Antisense Oligonucleotide
taattcacacttcataaaat

SEQ ID NO: 93 - DNA, 19 bp, Artificial Sequence
  Antisense Oligonucleotide
ataattcacacttcataaa

SEQ ID NO: 94 - DNA, 20 bp, Artificial Sequence
  Antisense Oligonucleotide
tataattcacacttcataaa

SEQ ID NO: 95 - DNA, 19 bp, Artificial Sequence
  Antisense Oligonucleotide
tataattcacacttcataa

SEQ ID NO: 96 - DNA, 18 bp, Artificial Sequence
  Antisense Oligonucleotide
cagtattccaaattccat

SEQ ID NO: 97 - DNA, 18 bp, Artificial Sequence
  Antisense Oligonucleotide
tcagtattccaaattcca

SEQ ID NO: 98 - DNA, 17 bp, Artificial Sequence
  Antisense Oligonucleotide
agttcaactctcaatta

SEQ ID NO: 99 - DNA, 18 bp, Artificial Sequence
  Antisense Oligonucleotide
aagttcaactctcaatta

SEQ ID NO: 100 - DNA, 17 bp, Artificial Sequence
  Antisense Oligonucleotide
taagttcaactctcaat

SEQ ID NO: 101 - DNA, 20 bp, Artificial Sequence
  Antisense Oligonucleotide
cattttttatcttaaattct

SEQ ID NO: 102 - DNA, 20 bp, Artificial Sequence
  Antisense Oligonucleotide
tcattttttatcttaaattc

SEQ ID NO: 103 - DNA, 18 bp, Artificial Sequence
  Antisense Oligonucleotide
catattttttactaatca

SEQ ID NO: 104 - DNA, 19 bp, Artificial Sequence
  Antisense Oligonucleotide
tcatattttttactaatca

SEQ ID NO: 105 - DNA, 20 bp, Artificial Sequence
  Antisense Oligonucleotide
atcatattttttactaatca

SEQ ID NO: 106 - DNA, 18 bp, Artificial Sequence
  Antisense Oligonucleotide
tcatattttttactaatc

SEQ ID NO: 107 - DNA, 19 bp, Artificial Sequence
  Antisense Oligonucleotide
atcatattttttactaatc

SEQ ID NO: 108 - DNA, 20 bp, Artificial Sequence
  Antisense Oligonucleotide
aatcatattttttactaatc

SEQ ID NO: 109 - DNA, 19 bp, Artificial Sequence
  Antisense Oligonucleotide
aatcatattttttactaat

SEQ ID NO: 110 - DNA, 20 bp, Artificial Sequence
  Antisense Oligonucleotide
taaatcatattttttactaa

SEQ ID NO: 111 - DNA, 20 bp, Artificial Sequence
  Antisense Oligonucleotide
ctaaatcatattttttacta

SEQ ID NO: 112 - DNA, 19 bp, Artificial Sequence
  Antisense Oligonucleotide
ctaaatcatattttttact

SEQ ID NO: 113 - DNA, 20 bp, Artificial Sequence
  Antisense Oligonucleotide
tctaaatcatattttttact

SEQ ID NO: 114 - DNA, 18 bp, Artificial Sequence
  Antisense Oligonucleotide
ctaaatcatattttttac

SEQ ID NO: 115 - DNA, 19 bp, Artificial Sequence
  Antisense Oligonucleotide
tctaaatcatattttttac

SEQ ID NO: 116 - DNA, 20 bp, Artificial Sequence
  Antisense Oligonucleotide
ttctaaatcatattttttac

SEQ ID NO: 117 - DNA, 20 bp, Artificial Sequence
  Antisense Oligonucleotide
tttctaaatcatatttttta

SEQ ID NO: 118 - DNA, 20 bp, Artificial Sequence
  Antisense Oligonucleotide
ttttctaaatcatatttttt

SEQ ID NO: 119 - DNA, 18 bp, Artificial Sequence
  Antisense Oligonucleotide
cagttttctaaatcatat

SEQ ID NO: 120 - DNA, 17 bp, Artificial Sequence
  Antisense Oligonucleotide
atgtatcaaaccaatca

SEQ ID NO: 121 - DNA, 18 bp, Artificial Sequence
  Antisense Oligonucleotide
catgtatcaaaccaatca

SEQ ID NO: 122 - DNA, 17 bp, Artificial Sequence
  Antisense Oligonucleotide
catgtatcaaaccaatc

SEQ ID NO: 123 - DNA, 18 bp, Artificial Sequence
  Antisense Oligonucleotide
ccatgtatcaaaccaatc

SEQ ID NO: 124 - DNA, 17 bp, Artificial Sequence
  Antisense Oligonucleotide
ccatgtatcaaaccaat

SEQ ID NO: 125 - DNA, 17 bp, Artificial Sequence
  Antisense Oligonucleotide
accatgtatcaaaccaa

SEQ ID NO: 126 - DNA, 19 bp, Artificial Sequence
  Antisense Oligonucleotide
agatcctaccatttacaac

SEQ ID NO: 127 - DNA, 18 bp, Artificial Sequence
  Antisense Oligonucleotide
aagatcctaccatttaca

SEQ ID NO: 128 - DNA, 18 bp, Artificial Sequence
  Antisense Oligonucleotide
tattacatattcactaaa

SEQ ID NO: 129 - DNA, 18 bp, Artificial Sequence
  Antisense Oligonucleotide
aatctctatctctcatcc

SEQ ID NO: 130 - DNA, 18 bp, Artificial Sequence
  Antisense Oligonucleotide
caatctctatctctcatc

SEQ ID NO: 131 - DNA, 19 bp, Artificial Sequence
  Antisense Oligonucleotide
gattcaaattttacttcca

SEQ ID NO: 132 - DNA, 18 bp, Artificial Sequence
  Antisense Oligonucleotide
attcaaattttacttcca

SEQ ID NO: 133 - DNA, 19 bp, Artificial Sequence
  Antisense Oligonucleotide
tttatcacaacctctttcc

SEQ ID NO: 134 - DNA, 18 bp, Artificial Sequence
  Antisense Oligonucleotide
ctctttatcacaacctct

SEQ ID NO: 135 - DNA, 18 bp, Artificial Sequence
  Antisense Oligonucleotide
cactctttatcacaacct

SEQ ID NO: 136 - DNA, 17 bp, Artificial Sequence
  Antisense Oligonucleotide
cactctttatcacaacc

SEQ ID NO: 137 - DNA, 18 bp, Artificial Sequence
  Antisense Oligonucleotide
tcactctttatcacaacc

SEQ ID NO: 138 - DNA, 19 bp, Artificial Sequence
  Antisense Oligonucleotide
ttcactctttatcacaacc

SEQ ID NO: 139 - DNA, 20 bp, Artificial Sequence
  Antisense Oligonucleotide
cttcactctttatcacaacc

SEQ ID NO: 140 - DNA, 17 bp, Artificial Sequence
  Antisense Oligonucleotide
tcactctttatcacaac

SEQ ID NO: 141 - DNA, 18 bp, Artificial Sequence
  Antisense Oligonucleotide
ttcactctttatcacaac

SEQ ID NO: 142 - DNA, 20 bp, Artificial Sequence
  Antisense Oligonucleotide
ccttcactctttatcacaac

SEQ ID NO: 143 - DNA, 20 bp, Artificial Sequence
  Antisense Oligonucleotide
accttcactctttatcacaa

SEQ ID NO: 144 - DNA, 18 bp, Artificial Sequence
  Antisense Oligonucleotide
ccttcactctttatcaca

SEQ ID NO: 145 - DNA, 19 bp, Artificial Sequence
  Antisense Oligonucleotide
accttcactctttatcaca

SEQ ID NO: 146 - DNA, 20 bp, Artificial Sequence
  Antisense Oligonucleotide
caccttcactctttatcaca

SEQ ID NO: 147 - DNA, 18 bp, Artificial Sequence
  Antisense Oligonucleotide
accttcactctttatcac

SEQ ID NO: 148 - DNA, 19 bp, Artificial Sequence
  Antisense Oligonucleotide
caccttcactctttatcac

SEQ ID NO: 149 - DNA, 18 bp, Artificial Sequence
  Antisense Oligonucleotide
caccttcactctttatca

SEQ ID NO: 150 - DNA, 18 bp, Artificial Sequence
  Antisense Oligonucleotide
tattcatatcctctctaa

SEQ ID NO: 151 - DNA, 18 bp, Artificial Sequence
  Antisense Oligonucleotide
ataagcacattcaaacta

SEQ ID NO: 152 - DNA, 19 bp, Artificial Sequence
  Antisense Oligonucleotide
ttacctatttaaaaatact

SEQ ID NO: 153 - DNA, 20 bp, Artificial Sequence
  Antisense Oligonucleotide
tttacctatttaaaaatact

SEQ ID NO: 154 - DNA, 19 bp, Artificial Sequence
  Antisense Oligonucleotide
ttactataaattaaacata

SEQ ID NO: 155 - DNA, 20 bp, Artificial Sequence
  Antisense Oligonucleotide
ctataccataacaatacaaa

SEQ ID NO: 156 - DNA, 18 bp, Artificial Sequence
  Antisense Oligonucleotide
tataccataacaatacaa

SEQ ID NO: 157 - DNA, 19 bp, Artificial Sequence
  Antisense Oligonucleotide
ctataccataacaatacaa

SEQ ID NO: 158 - DNA, 19 bp, Artificial Sequence
  Antisense Oligonucleotide
gctataccataacaataca

SEQ ID NO: 159 - DNA, 18 bp, Artificial Sequence
  Antisense Oligonucleotide
ctataccataacaataca

SEQ ID NO: 160 - DNA, 19 bp, Artificial Sequence
  Antisense Oligonucleotide
agctataccataacaatac

SEQ ID NO: 161 - DNA, 17 bp, Artificial Sequence
  Antisense Oligonucleotide
ctataccataacaatac

SEQ ID NO: 162 - DNA, 18 bp, Artificial Sequence
  Antisense Oligonucleotide
gctataccataacaatac

SEQ ID NO: 163 - DNA, 18 bp, Artificial Sequence
  Antisense Oligonucleotide
agctataccataacaata

SEQ ID NO: 164 - DNA, 18 bp, Artificial Sequence
  Antisense Oligonucleotide
tagctataccataacaat

SEQ ID NO: 165 - DNA, 17 bp, Artificial Sequence
  Antisense Oligonucleotide
tagctataccataacaa

SEQ ID NO: 166 - DNA, 18 bp, Artificial Sequence
  Antisense Oligonucleotide
atagctataccataacaa

SEQ ID NO: 167 - DNA, 17 bp, Artificial Sequence
  Antisense Oligonucleotide
atagctataccataaca

SEQ ID NO: 168 - DNA, 18 bp, Artificial Sequence
  Antisense Oligonucleotide
aatagctataccataaca

SEQ ID NO: 169 - DNA, 17 bp, Artificial Sequence
  Antisense Oligonucleotide
aatagctataccataac

SEQ ID NO: 170 - DNA, 18 bp, Artificial Sequence
  Antisense Oligonucleotide
taagattcccatatcatt

SEQ ID NO: 171 - DNA, 19 bp, Artificial Sequence
  Antisense Oligonucleotide
tcacaatatcatatttata

SEQ ID NO: 172 - DNA, 20 bp, Artificial Sequence
  Antisense Oligonucleotide
ttcacaatatcatatttata

SEQ ID NO: 173 - DNA, 18 bp, Artificial Sequence
  Antisense Oligonucleotide
cacaatatcatatttata

SEQ ID NO: 174 - DNA, 19 bp, Artificial Sequence
  Antisense Oligonucleotide
ttcacaatatcatatttat

SEQ ID NO: 175 - DNA, 20 bp, Artificial Sequence
  Antisense Oligonucleotide
cttcacaatatcatatttat

SEQ ID NO: 176 - DNA, 18 bp, Artificial Sequence
  Antisense Oligonucleotide
tcacaatatcatatttat

SEQ ID NO: 177 - DNA, 19 bp, Artificial Sequence
  Antisense Oligonucleotide
cttcacaatatcatattta

SEQ ID NO: 178 - DNA, 18 bp, Artificial Sequence
  Antisense Oligonucleotide
ttcacaatatcatattta

SEQ ID NO: 179 - DNA, 18 bp, Artificial Sequence
  Antisense Oligonucleotide
cttcacaatatcatattt

SEQ ID NO: 180 - DNA, 18 bp, Artificial Sequence
  Antisense Oligonucleotide
gcttcacaatatcatatt

SEQ ID NO: 181 - DNA, 18 bp, Artificial Sequence
  Antisense Oligonucleotide
tgcttcacaatatcatat

SEQ ID NO: 182 - DNA, 18 bp, Artificial Sequence
  Antisense Oligonucleotide
atgcttcacaatatcata

SEQ ID NO: 183 - DNA, 18 bp, Artificial Sequence
  Antisense Oligonucleotide
cttcctcaactactaaat

SEQ ID NO: 184 - DNA, 19 bp, Artificial Sequence
  Antisense Oligonucleotide
gttcttcctcaactactaa

SEQ ID NO: 185 - DNA, 18 bp, Artificial Sequence
  Antisense Oligonucleotide
actagtttcattcaaccc

SEQ ID NO: 186 - DNA, 17 bp, Artificial Sequence
  Antisense Oligonucleotide
actagtttcattcaacc

SEQ ID NO: 187 - DNA, 17 bp, Artificial Sequence
  Antisense Oligonucleotide
cactagtttcattcaac

SEQ ID NO: 188 - DNA, 19 bp, Artificial Sequence
  Antisense Oligonucleotide
ctttatattaaataaccct

SEQ ID NO: 189 - DNA, 20 bp, Artificial Sequence
  Antisense Oligonucleotide
actttatattaaataaccct

SEQ ID NO: 190 - DNA, 19 bp, Artificial Sequence
  Antisense Oligonucleotide
actttatattaaataaccc

SEQ ID NO: 191 - DNA, 18 bp, Artificial Sequence
  Antisense Oligonucleotide
agcactttatattaaata

SEQ ID NO: 192 - DNA, 19 bp, Artificial Sequence
  Antisense Oligonucleotide
ttatttcttctcataatta

SEQ ID NO: 193 - DNA, 17 bp, Artificial Sequence
  Antisense Oligonucleotide
ttgatattatctaacta

SEQ ID NO: 194 - DNA, 17 bp, Artificial Sequence
  Antisense Oligonucleotide
cattgatattatctaac

SEQ ID NO: 195 - DNA, 18 bp, Artificial Sequence
  Antisense Oligonucleotide
taagaatcaaaaccttca

SEQ ID NO: 196 - DNA, 18 bp, Artificial Sequence
  Antisense Oligonucleotide
ataagaatcaaaaccttc

SEQ ID NO: 197 - DNA, 20 bp, Artificial Sequence
  Antisense Oligonucleotide
tttctttatattatttcata

SEQ ID NO: 198 - DNA, 20 bp, Artificial Sequence
  Antisense Oligonucleotide
ttttctttatattatttcat

SEQ ID NO: 199 - DNA, 19 bp, Artificial Sequence
  Antisense Oligonucleotide
cacatttaaaaacatttct

SEQ ID NO: 200 - DNA, 20 bp, Artificial Sequence
  Antisense Oligonucleotide
acacatttaaaaacatttct

SEQ ID NO: 201 - DNA, 19 bp, Artificial Sequence
  Antisense Oligonucleotide
gacacatttaaaaacattt

SEQ ID NO: 202 - DNA, 19 bp, Artificial Sequence
  Antisense Oligonucleotide
cgacacatttaaaaacatt

SEQ ID NO: 203 - DNA, 18 bp, Artificial Sequence
  Antisense Oligonucleotide
cgacacatttaaaaacat

SEQ ID NO: 204 - DNA, 18 bp, Artificial Sequence
  Antisense Oligonucleotide
tcgacacatttaaaaaca

SEQ ID NO: 205 - DNA, 18 bp, Artificial Sequence
  Antisense Oligonucleotide
tattattataatcataaa

SEQ ID NO: 206 - DNA, 18 bp, Artificial Sequence
  Antisense Oligonucleotide
ttattattataatcataa

SEQ ID NO: 207 - DNA, 19 bp, Artificial Sequence
  Antisense Oligonucleotide
cataaattttataatatct

SEQ ID NO: 208 - DNA, 19 bp, Artificial Sequence
  Antisense Oligonucleotide
ccataaattttataatatc

SEQ ID NO: 209 - DNA, 18 bp, Artificial Sequence
  Antisense Oligonucleotide
ccataaattttataatat

SEQ ID NO: 210 - DNA, 18 bp, Artificial Sequence
  Antisense Oligonucleotide
gccataaattttataata

SEQ ID NO: 211 - DNA, 18 bp, Artificial Sequence
  Antisense Oligonucleotide
agccataaattttataat

SEQ ID NO: 212 - DNA, 18 bp, Artificial Sequence
  Antisense Oligonucleotide
cagccataaattttataa

SEQ ID NO: 213 - DNA, 18 bp, Artificial Sequence
  Antisense Oligonucleotide
agctatttacaattcaaa

SEQ ID NO: 214 - DNA, 20 bp, Artificial Sequence
  Antisense Oligonucleotide
catacttctatttatttatt

SEQ ID NO: 215 - DNA, 20 bp, Artificial Sequence
  Antisense Oligonucleotide
acatacttctatttatttat

SEQ ID NO: 216 - DNA, 20 bp, Artificial Sequence
  Antisense Oligonucleotide
tacatacttctatttattta

SEQ ID NO: 217 - DNA, 20 bp, Artificial Sequence
  Antisense Oligonucleotide
atacatacttctatttattt

SEQ ID NO: 218 - DNA, 20 bp, Artificial Sequence
  Antisense Oligonucleotide
aatacatacttctatttatt

SEQ ID NO: 219 - DNA, 20 bp, Artificial Sequence
  Antisense Oligonucleotide
caatacatacttctatttat

SEQ ID NO: 220 - DNA, 18 bp, Artificial Sequence
  Antisense Oligonucleotide
aatacatacttctattta

SEQ ID NO: 221 - DNA, 18 bp, Artificial Sequence
  Antisense Oligonucleotide
caatacatacttctattt

SEQ ID NO: 222 - DNA, 19 bp, Artificial Sequence
  Antisense Oligonucleotide
atttctttatttcaattca

SEQ ID NO: 223 - DNA, 20 bp, Artificial Sequence
  Antisense Oligonucleotide
tatttctttatttcaattca

SEQ ID NO: 224 - DNA, 19 bp, Artificial Sequence
  Antisense Oligonucleotide
tatttctttatttcaattc

SEQ ID NO: 225 - DNA, 20 bp, Artificial Sequence
  Antisense Oligonucleotide
atatttctttatttcaattc

SEQ ID NO: 226 - DNA, 20 bp, Artificial Sequence
  Antisense Oligonucleotide
aatatttctttatttcaatt

SEQ ID NO: 227 - DNA, 18 bp, Artificial Sequence
  Antisense Oligonucleotide
aatatttctttatttcaa

SEQ ID NO: 228 - DNA, 20 bp, Artificial Sequence
  Antisense Oligonucleotide
taaaatcattccacttccac

SEQ ID NO: 229 - DNA, 18 bp, Artificial Sequence
  Antisense Oligonucleotide
aaaatcattccacttcca

SEQ ID NO: 230 - DNA, 19 bp, Artificial Sequence
  Antisense Oligonucleotide
taaaatcattccacttcca

SEQ ID NO: 231 - DNA, 20 bp, Artificial Sequence
  Antisense Oligonucleotide
ttaaaatcattccacttcca

SEQ ID NO: 232 - DNA, 19 bp, Artificial Sequence
  Antisense Oligonucleotide
ttaaaatcattccacttcc

SEQ ID NO: 233 - DNA, 16 bp, Artificial Sequence
  Antisense Oligonucleotide
ctccaacatttgtcac

SEQ ID NO: 234 - DNA, 16 bp, Artificial Sequence
  Antisense Oligonucleotide
cctccaacatttgtca

SEQ ID NO: 235 - DNA, 16 bp, Artificial Sequence
  Antisense Oligonucleotide
gctcctccaacatttg

SEQ ID NO: 236 - DNA, 16 bp, Artificial Sequence
  Antisense Oligonucleotide
tcttctgggctactgc

SEQ ID NO: 237 - DNA, 16 bp, Artificial Sequence
  Antisense Oligonucleotide
ttgacaaagccagtgg

SEQ ID NO: 238 - DNA, 19 bp, Artificial Sequence
  Antisense Oligonucleotide
aaatctacctcaaaactat

SEQ ID NO: 239 - DNA, 19 bp, Artificial Sequence
  Antisense Oligonucleotide
gaattttaaaatctacctc

SEQ ID NO: 240 - DNA, 20 bp, Artificial Sequence
  Antisense Oligonucleotide
aataaatatatttcactctc

SEQ ID NO: 241 - DNA, 18 bp, Artificial Sequence
  Antisense Oligonucleotide
ctccttaatttaataaat

SEQ ID NO: 242 - DNA, 18 bp, Artificial Sequence
  Antisense Oligonucleotide
cctccttaatttaataaa

SEQ ID NO: 243 - DNA, 20 bp, Artificial Sequence
  Antisense Oligonucleotide
aacttctttctcacaatttt

SEQ ID NO: 244 - DNA, 20 bp, Artificial Sequence
  Antisense Oligonucleotide
taaaacttctttctcacaat

SEQ ID NO: 245 - DNA, 19 bp, Artificial Sequence
  Antisense Oligonucleotide
taaaacttctttctcacaa

SEQ ID NO: 246 - DNA, 20 bp, Artificial Sequence
  Antisense Oligonucleotide
ataaaacttctttctcacaa

SEQ ID NO: 247 - DNA, 18 bp, Artificial Sequence
  Antisense Oligonucleotide
taaaacttctttctcaca

SEQ ID NO: 248 - DNA, 19 bp, Artificial Sequence
  Antisense Oligonucleotide
ataaaacttctttctcaca

SEQ ID NO: 249 - DNA, 20 bp, Artificial Sequence
  Antisense Oligonucleotide
aataaaacttctttctcaca

SEQ ID NO: 250 - DNA, 18 bp, Artificial Sequence
  Antisense Oligonucleotide
ataaaacttctttctcac

SEQ ID NO: 251 - DNA, 19 bp, Artificial Sequence
  Antisense Oligonucleotide
aataaaacttctttctcac

SEQ ID NO: 252 - DNA, 19 bp, Artificial Sequence
  Antisense Oligonucleotide
aaataaaacttctttctca

SEQ ID NO: 253 - DNA, 20 bp, Artificial Sequence
  Antisense Oligonucleotide
taatataattattatcccta

SEQ ID NO: 254 - DNA, 19 bp, Artificial Sequence
  Antisense Oligonucleotide
taatataattattatccct

SEQ ID NO: 255 - DNA, 20 bp, Artificial Sequence
  Antisense Oligonucleotide
ttaatataattattatccct

SEQ ID NO: 256 - DNA, 18 bp, Artificial Sequence
  Antisense Oligonucleotide
taatataattattatccc

SEQ ID NO: 257 - DNA, 19 bp, Artificial Sequence
  Antisense Oligonucleotide
ttaatataattattatccc

SEQ ID NO: 258 - DNA, 20 bp, Artificial Sequence
  Antisense Oligonucleotide
attaatataattattatccc

SEQ ID NO: 259 - DNA, 19 bp, Artificial Sequence
  Antisense Oligonucleotide
attaatataattattatcc

SEQ ID NO: 260 - DNA, 18 bp, Artificial Sequence
  Antisense Oligonucleotide
gtttatttccacaactat

SEQ ID NO: 261 - DNA, 18 bp, Artificial Sequence
  Antisense Oligonucleotide
atgtttatttccacaact

SEQ ID NO: 262 - DNA, 18 bp, Artificial Sequence
  Antisense Oligonucleotide
aatgtttatttccacaac

SEQ ID NO: 263 - DNA, 20 bp, Artificial Sequence
  Antisense Oligonucleotide
acaaattaaatactttcatt

SEQ ID NO: 264 - DNA, 19 bp, Artificial Sequence
  Antisense Oligonucleotide
acaaattaaatactttcat

SEQ ID NO: 265 - DNA, 20 bp, Artificial Sequence
  Antisense Oligonucleotide
aacaaattaaatactttcat

SEQ ID NO: 266 - DNA, 19 bp, Artificial Sequence
  Antisense Oligonucleotide
aacaaattaaatactttca

SEQ ID NO: 267 - DNA, 18 bp, Artificial Sequence
  Antisense Oligonucleotide
attaatccacttctacaa

SEQ ID NO: 268 - DNA, 19 bp, Artificial Sequence
  Antisense Oligonucleotide
cattaatccacttctacaa

SEQ ID NO: 269 - DNA, 20 bp, Artificial Sequence
  Antisense Oligonucleotide
ccattaatccacttctacaa

SEQ ID NO: 270 - DNA, 18 bp, Artificial Sequence
  Antisense Oligonucleotide
cattaatccacttctaca

SEQ ID NO: 271 - DNA, 19 bp, Artificial Sequence
  Antisense Oligonucleotide
ccattaatccacttctaca

SEQ ID NO: 272 - DNA, 17 bp, Artificial Sequence
  Antisense Oligonucleotide
cattaatccacttctac

SEQ ID NO: 273 - DNA, 18 bp, Artificial Sequence
  Antisense Oligonucleotide
gccattaatccacttcta

SEQ ID NO: 274 - DNA, 17 bp, Artificial Sequence
  Antisense Oligonucleotide
gccattaatccacttct

SEQ ID NO: 275 - DNA, 17 bp, Artificial Sequence
  Antisense Oligonucleotide
ctctatataacatcact

SEQ ID NO: 276 - DNA, 19 bp, Artificial Sequence
  Antisense Oligonucleotide
ttctctatataacatcact

SEQ ID NO: 277 - DNA, 17 bp, Artificial Sequence
  Antisense Oligonucleotide
tctctatataacatcac

SEQ ID NO: 278 - DNA, 19 bp, Artificial Sequence
  Antisense Oligonucleotide
tttctctatataacatcac

SEQ ID NO: 279 - DNA, 19 bp, Artificial Sequence
  Antisense Oligonucleotide
attttctctatataacatc

SEQ ID NO: 280 - DNA, 20 bp, Artificial Sequence
  Antisense Oligonucleotide
aattttctctatataacatc

SEQ ID NO: 281 - DNA, 19 bp, Artificial Sequence
  Antisense Oligonucleotide
aattttctctatataacat

SEQ ID NO: 282 - DNA, 20 bp, Artificial Sequence
  Antisense Oligonucleotide
aaattttctctatataacat

SEQ ID NO: 283 - DNA, 20 bp, Artificial Sequence
  Antisense Oligonucleotide
taaattttctctatataaca

SEQ ID NO: 284 - DNA, 19 bp, Artificial Sequence
  Antisense Oligonucleotide
taaattttctctatataac

SEQ ID NO: 285 - DNA, 20 bp, Artificial Sequence
  Antisense Oligonucleotide
ataaattttctctatataac

SEQ ID NO: 286 - DNA, 19 bp, Artificial Sequence
  Antisense Oligonucleotide
ataaattttctctatataa

SEQ ID NO: 287 - DNA, 20 bp, Artificial Sequence
  Antisense Oligonucleotide
tataaattttctctatataa

SEQ ID NO: 288 - DNA, 20 bp, Artificial Sequence
  Antisense Oligonucleotide
atataaattttctctatata

SEQ ID NO: 289 - DNA, 20 bp, Artificial Sequence
  Antisense Oligonucleotide
aatataaattttctctatat

SEQ ID NO: 290 - DNA, 19 bp, Artificial Sequence
  Antisense Oligonucleotide
atataaattttctctatat

SEQ ID NO: 291 - DNA, 20 bp, Artificial Sequence
  Antisense Oligonucleotide
ataaattaaaatatttctcc

SEQ ID NO: 292 - DNA, 20 bp, Artificial Sequence
  Antisense Oligonucleotide
tataaattaaaatatttctc

SEQ ID NO: 293 - DNA, 20 bp, Artificial Sequence
  Antisense Oligonucleotide
ctataaattaaaatatttct

SEQ ID NO: 294 - DNA, 20 bp, Artificial Sequence
  Antisense Oligonucleotide
aatttttctttaataatcac

SEQ ID NO: 295 - DNA, 19 bp, Artificial Sequence
  Antisense Oligonucleotide
aacttttacataccacatt

SEQ ID NO: 296 - DNA, 18 bp, Artificial Sequence
  Antisense Oligonucleotide
aacttttacataccacat

SEQ ID NO: 297 - DNA, 18 bp, Artificial Sequence
  Antisense Oligonucleotide
ctttgacaaacaaaacta

SEQ ID NO: 298 - DNA, 20 bp, Artificial Sequence
  Antisense Oligonucleotide
atcctataatacatttcttt

SEQ ID NO: 299 - DNA, 17 bp, Artificial Sequence
  Antisense Oligonucleotide
actcatcctataataca

SEQ ID NO: 300 - DNA, 19 bp, Artificial Sequence
  Antisense Oligonucleotide
ccactcatcctataataca

SEQ ID NO: 301 - DNA, 19 bp, Artificial Sequence
  Antisense Oligonucleotide
cccactcatcctataatac

SEQ ID NO: 302 - DNA, 18 bp, Artificial Sequence
  Antisense Oligonucleotide
cccactcatcctataata

SEQ ID NO: 303 - DNA, 17 bp, Artificial Sequence
  Antisense Oligonucleotide
cccactcatcctataat

SEQ ID NO: 304 - DNA, 19 bp, Artificial Sequence
  Antisense Oligonucleotide
tatcccactcatcctataa

SEQ ID NO: 305 - DNA, 18 bp, Artificial Sequence
  Antisense Oligonucleotide
taagtatctcaaaacatc

SEQ ID NO: 306 - DNA, 18 bp, Artificial Sequence
  Antisense Oligonucleotide
gtttattatcaaattaca

SEQ ID NO: 307 - DNA, 18 bp, Artificial Sequence
  Antisense Oligonucleotide
agtttattatcaaattac

SEQ ID NO: 308 - DNA, 18 bp, Artificial Sequence
  Antisense Oligonucleotide
acatcttatcctatttat

SEQ ID NO: 309 - DNA, 19 bp, Artificial Sequence
  Antisense Oligonucleotide
cacatcttatcctatttat

SEQ ID NO: 310 - DNA, 20 bp, Artificial Sequence
  Antisense Oligonucleotide
acacatcttatcctatttat

SEQ ID NO: 311 - DNA, 18 bp, Artificial Sequence
  Antisense Oligonucleotide
cacatcttatcctattta

SEQ ID NO: 312 - DNA, 19 bp, Artificial Sequence
  Antisense Oligonucleotide
acacatcttatcctattta

SEQ ID NO: 313 - DNA, 18 bp, Artificial Sequence
  Antisense Oligonucleotide
acacatcttatcctattt

SEQ ID NO: 314 - DNA, 20 bp, Artificial Sequence
  Antisense Oligonucleotide
taatatataaacacatctta

SEQ ID NO: 315 - DNA, 19 bp, Artificial Sequence
  Antisense Oligonucleotide
taatatataaacacatctt

SEQ ID NO: 316 - DNA, 20 bp, Artificial Sequence
  Antisense Oligonucleotide
ataatatataaacacatctt

SEQ ID NO: 317 - DNA, 20 bp, Artificial Sequence
  Antisense Oligonucleotide
aataatatataaacacatct

SEQ ID NO: 318 - DNA, 19 bp, Artificial Sequence
  Antisense Oligonucleotide
aataatatataaacacatc

SEQ ID NO: 319 - DNA, 19 bp, Artificial Sequence
  Antisense Oligonucleotide
taatctatttattcaacaa

SEQ ID NO: 320 - DNA, 20 bp, Artificial Sequence
  Antisense Oligonucleotide
ataatctatttattcaacaa

SEQ ID NO: 321 - DNA, 19 bp, Artificial Sequence
  Antisense Oligonucleotide
ataatctatttattcaaca

SEQ ID NO: 322 - DNA, 20 bp, Artificial Sequence
  Antisense Oligonucleotide
aataatctatttattcaaca

SEQ ID NO: 323 - DNA, 18 bp, Artificial Sequence
  Antisense Oligonucleotide
ataatctatttattcaac

SEQ ID NO: 324 - DNA, 19 bp, Artificial Sequence
  Antisense Oligonucleotide
aataatctatttattcaac

SEQ ID NO: 325 - DNA, 18 bp, Artificial Sequence
  Antisense Oligonucleotide
attattcatcacaatcca

SEQ ID NO: 326 - DNA, 19 bp, Artificial Sequence
  Antisense Oligonucleotide
cattattcatcacaatcca

SEQ ID NO: 327 - DNA, 20 bp, Artificial Sequence
  Antisense Oligonucleotide
acattattcatcacaatcca

SEQ ID NO: 328 - DNA, 17 bp, Artificial Sequence
  Antisense Oligonucleotide
attattcatcacaatcc

SEQ ID NO: 329 - DNA, 18 bp, Artificial Sequence
  Antisense Oligonucleotide
cattattcatcacaatcc

SEQ ID NO: 330 - DNA, 19 bp, Artificial Sequence
  Antisense Oligonucleotide
acattattcatcacaatcc

SEQ ID NO: 331 - DNA, 20 bp, Artificial Sequence
  Antisense Oligonucleotide
tacattattcatcacaatcc

SEQ ID NO: 332 - DNA, 18 bp, Artificial Sequence
  Antisense Oligonucleotide
acattattcatcacaatc

SEQ ID NO: 333 - DNA, 19 bp, Artificial Sequence
  Antisense Oligonucleotide
tacattattcatcacaatc

SEQ ID NO: 334 - DNA, 19 bp, Artificial Sequence
  Antisense Oligonucleotide
gtacattattcatcacaat

SEQ ID NO: 335 - DNA, 18 bp, Artificial Sequence
  Antisense Oligonucleotide
gtacattattcatcacaa

SEQ ID NO: 336 - DNA, 18 bp, Artificial Sequence
  Antisense Oligonucleotide
tgtacattattcatcaca

SEQ ID NO: 337 - DNA, 18 bp, Artificial Sequence
  Antisense Oligonucleotide
tgtttcaaactcataaat

SEQ ID NO: 338 - DNA, 18 bp, Artificial Sequence
  Antisense Oligonucleotide
ttgtttcaaactcataaa

SEQ ID NO: 339 - DNA, 20 bp, Artificial Sequence
  Antisense Oligonucleotide
ttcaacatttttatttcaca

SEQ ID NO: 340 - DNA, 19 bp, Artificial Sequence
  Antisense Oligonucleotide
ttcaacatttttatttcac

SEQ ID NO: 341 - DNA, 20 bp, Artificial Sequence
  Antisense Oligonucleotide
attcaacatttttatttcac

SEQ ID NO: 342 - DNA, 19 bp, Artificial Sequence
  Antisense Oligonucleotide
attcaacatttttatttca

SEQ ID NO: 343 - DNA, 20 bp, Artificial Sequence
  Antisense Oligonucleotide
aattcaacatttttatttca

SEQ ID NO: 344 - DNA, 20 bp, Artificial Sequence
  Antisense Oligonucleotide
taattcaacatttttatttc

SEQ ID NO: 345 - DNA, 20 bp, Artificial Sequence
  Antisense Oligonucleotide
ttaattcaacatttttattt

SEQ ID NO: 346 - DNA, 20 bp, Artificial Sequence
  Antisense Oligonucleotide
tttaattcaacatttttatt

SEQ ID NO: 347 - DNA, 20 bp, Artificial Sequence
  Antisense Oligonucleotide
atttaattcaacatttttat

SEQ ID NO: 348 - DNA, 20 bp, Artificial Sequence
  Antisense Oligonucleotide
catttaattcaacattttta

SEQ ID NO: 349 - DNA, 19 bp, Artificial Sequence
  Antisense Oligonucleotide
catttaattcaacattttt

SEQ ID NO: 350 - DNA, 20 bp, Artificial Sequence
  Antisense Oligonucleotide
tcatttaattcaacattttt

SEQ ID NO: 351 - DNA, 19 bp, Artificial Sequence
  Antisense Oligonucleotide
tcatttaattcaacatttt

SEQ ID NO: 352 - DNA, 20 bp, Artificial Sequence
  Antisense Oligonucleotide
ctcatttaattcaacatttt

SEQ ID NO: 353 - DNA, 19 bp, Artificial Sequence
  Antisense Oligonucleotide
ctcatttaattcaacattt

SEQ ID NO: 354 - DNA, 20 bp, Artificial Sequence
  Antisense Oligonucleotide
actcatttaattcaacattt

SEQ ID NO: 355 - DNA, 19 bp, Artificial Sequence
  Antisense Oligonucleotide
actcatttaattcaacatt

SEQ ID NO: 356 - DNA, 18 bp, Artificial Sequence
  Antisense Oligonucleotide
actcatttaattcaacat

SEQ ID NO: 357 - DNA, 19 bp, Artificial Sequence
  Antisense Oligonucleotide
gaactcatttaattcaaca

SEQ ID NO: 358 - DNA, 18 bp, Artificial Sequence
  Antisense Oligonucleotide
ttgaactcatttaattca

SEQ ID NO: 359 - DNA, 20 bp, Artificial Sequence
  Antisense Oligonucleotide
ttaatatcatcaaactacaa

SEQ ID NO: 360 - DNA, 20 bp, Artificial Sequence
  Antisense Oligonucleotide
acttaatatcatcaaactac

SEQ ID NO: 361 - DNA, 18 bp, Artificial Sequence
  Antisense Oligonucleotide
ttaatatcatcaaactac

SEQ ID NO: 362 - DNA, 20 bp, Artificial Sequence
  Antisense Oligonucleotide
tacttaatatcatcaaacta

SEQ ID NO: 363 - DNA, 18 bp, Artificial Sequence
  Antisense Oligonucleotide
cttaatatcatcaaacta

SEQ ID NO: 364 - DNA, 20 bp, Artificial Sequence
  Antisense Oligonucleotide
cttacttaatatcatcaaac

SEQ ID NO: 365 - DNA, 20 bp, Artificial Sequence
  Antisense Oligonucleotide
ttacttacttaatatcatca

SEQ ID NO: 366 - DNA, 18 bp, Artificial Sequence
  Antisense Oligonucleotide
atttacttacttaatatc

SEQ ID NO: 367 - DNA, 19 bp, Artificial Sequence
  Antisense Oligonucleotide
aatttacttacttaatatc

SEQ ID NO: 368 - DNA, 20 bp, Artificial Sequence
  Antisense Oligonucleotide
caatttacttacttaatatc

SEQ ID NO: 369 - DNA, 19 bp, Artificial Sequence
  Antisense Oligonucleotide
caatttacttacttaatat

SEQ ID NO: 370 - DNA, 20 bp, Artificial Sequence
  Antisense Oligonucleotide
acaatttacttacttaatat

SEQ ID NO: 371 - DNA, 18 bp, Artificial Sequence
  Antisense Oligonucleotide
caatttacttacttaata

SEQ ID NO: 372 - DNA, 19 bp, Artificial Sequence
  Antisense Oligonucleotide
acaatttacttacttaata

SEQ ID NO: 373 - DNA, 20 bp, Artificial Sequence
  Antisense Oligonucleotide
tacaatttacttacttaata

SEQ ID NO: 374 - DNA, 18 bp, Artificial Sequence
  Antisense Oligonucleotide
acaatttacttacttaat

SEQ ID NO: 375 - DNA, 19 bp, Artificial Sequence
  Antisense Oligonucleotide
tacaatttacttacttaat

SEQ ID NO: 376 - DNA, 20 bp, Artificial Sequence
  Antisense Oligonucleotide
atacaatttacttacttaat

SEQ ID NO: 377 - DNA, 20 bp, Artificial Sequence
  Antisense Oligonucleotide
tatacaatttacttacttaa

SEQ ID NO: 378 - DNA, 19 bp, Artificial Sequence
  Antisense Oligonucleotide
tatacaatttacttactta

SEQ ID NO: 379 - DNA, 20 bp, Artificial Sequence
  Antisense Oligonucleotide
ttatacaatttacttactta

SEQ ID NO: 380 - DNA, 19 bp, Artificial Sequence
  Antisense Oligonucleotide
ttatacaatttacttactt

SEQ ID NO: 381 - DNA, 18 bp, Artificial Sequence
  Antisense Oligonucleotide
ttatacaatttacttact

SEQ ID NO: 382 - DNA, 18 bp, Artificial Sequence
  Antisense Oligonucleotide
gttatacaatttacttac

SEQ ID NO: 383 - DNA, 18 bp, Artificial Sequence
  Antisense Oligonucleotide
ccattctaattataccat

SEQ ID NO: 384 - DNA, 17 bp, Artificial Sequence
  Antisense Oligonucleotide
ccattctaattatacca

SEQ ID NO: 385 - DNA, 18 bp, Artificial Sequence
  Antisense Oligonucleotide
ctgataatctctctaaat

SEQ ID NO: 386 - DNA, 18 bp, Artificial Sequence
  Antisense Oligonucleotide
aatagcatccttccacac

SEQ ID NO: 387 - DNA, 17 bp, Artificial Sequence
  Antisense Oligonucleotide
aatagcatccttccaca

SEQ ID NO: 388 - DNA, 17 bp, Artificial Sequence
  Antisense Oligonucleotide
caatagcatccttccac

SEQ ID NO: 389 - DNA, 16 bp, Artificial Sequence
  Antisense Oligonucleotide
aataagaaaggaacgc

SEQ ID NO: 390 - DNA, 17 bp, Artificial Sequence
  Antisense Oligonucleotide
actatgatacttcactc

SEQ ID NO: 391 - DNA, 20 bp, Artificial Sequence
  Antisense Oligonucleotide
ttactcctacaaattttttt

SEQ ID NO: 392 - DNA, 19 bp, Artificial Sequence
  Antisense Oligonucleotide
ttactcctacaaatttttt

SEQ ID NO: 393 - DNA, 20 bp, Artificial Sequence
  Antisense Oligonucleotide
attactcctacaaatttttt

SEQ ID NO: 394 - DNA, 18 bp, Artificial Sequence
  Antisense Oligonucleotide
ttactcctacaaattttt

SEQ ID NO: 395 - DNA, 19 bp, Artificial Sequence
  Antisense Oligonucleotide
attactcctacaaattttt

SEQ ID NO: 396 - DNA, 20 bp, Artificial Sequence
  Antisense Oligonucleotide
aattactcctacaaattttt

SEQ ID NO: 397 - DNA, 20 bp, Artificial Sequence
  Antisense Oligonucleotide
caattactcctacaaatttt

SEQ ID NO: 398 - DNA, 19 bp, Artificial Sequence
  Antisense Oligonucleotide
caattactcctacaaattt

SEQ ID NO: 399 - DNA, 20 bp, Artificial Sequence
  Antisense Oligonucleotide
ccaattactcctacaaattt

SEQ ID NO: 400 - DNA, 19 bp, Artificial Sequence
  Antisense Oligonucleotide
ccaattactcctacaaatt

SEQ ID NO: 401 - DNA, 18 bp, Artificial Sequence
  Antisense Oligonucleotide
caattactcctacaaatt

SEQ ID NO: 402 - DNA, 18 bp, Artificial Sequence
  Antisense Oligonucleotide
ttgttacctttcaataaa

SEQ ID NO: 403 - DNA, 18 bp, Artificial Sequence
  Antisense Oligonucleotide
ccaaaaacatacaactat

SEQ ID NO: 404 - DNA, 19 bp, Artificial Sequence
  Antisense Oligonucleotide
tccaaaaacatacaactat

SEQ ID NO: 405 - DNA, 20 bp, Artificial Sequence
  Antisense Oligonucleotide
ttccaaaaacatacaactat

SEQ ID NO: 406 - DNA, 19 bp, Artificial Sequence
  Antisense Oligonucleotide
ttccaaaaacatacaacta

SEQ ID NO: 407 - DNA, 20 bp, Artificial Sequence
  Antisense Oligonucleotide
cttccaaaaacatacaacta

SEQ ID NO: 408 - DNA, 19 bp, Artificial Sequence
  Antisense Oligonucleotide
cttccaaaaacatacaact

SEQ ID NO: 409 - DNA, 18 bp, Artificial Sequence
  Antisense Oligonucleotide
cttccaaaaacatacaac

SEQ ID NO: 410 - DNA, 20 bp, Artificial Sequence
  Antisense Oligonucleotide
tacttccaaaaacatacaac

SEQ ID NO: 411 - DNA, 20 bp, Artificial Sequence
  Antisense Oligonucleotide
ctacttccaaaaacatacaa

SEQ ID NO: 412 - DNA, 19 bp, Artificial Sequence
  Antisense Oligonucleotide
tacttccaaaaacatacaa

SEQ ID NO: 413 - DNA, 20 bp, Artificial Sequence
  Antisense Oligonucleotide
tctacttccaaaaacataca

SEQ ID NO: 414 - DNA, 19 bp, Artificial Sequence
  Antisense Oligonucleotide
ctacttccaaaaacataca

SEQ ID NO: 415 - DNA, 19 bp, Artificial Sequence
  Antisense Oligonucleotide
ttctacttccaaaaacata

SEQ ID NO: 416 - DNA, 20 bp, Artificial Sequence
  Antisense Oligonucleotide
attctacttccaaaaacata

SEQ ID NO: 417 - DNA, 19 bp, Artificial Sequence
  Antisense Oligonucleotide
attctacttccaaaaacat

SEQ ID NO: 418 - DNA, 18 bp, Artificial Sequence
  Antisense Oligonucleotide
attctacttccaaaaaca

SEQ ID NO: 419 - DNA, 18 bp, Artificial Sequence
  Antisense Oligonucleotide
aaccaatttctatttaca

SEQ ID NO: 420 - DNA, 19 bp, Artificial Sequence
  Antisense Oligonucleotide
caaccaatttctatttaca

SEQ ID NO: 421 - DNA, 20 bp, Artificial Sequence
  Antisense Oligonucleotide
acaaccaatttctatttaca

SEQ ID NO: 422 - DNA, 19 bp, Artificial Sequence
  Antisense Oligonucleotide
acaaccaatttctatttac

SEQ ID NO: 423 - DNA, 20 bp, Artificial Sequence
  Antisense Oligonucleotide
aacaaccaatttctatttac

SEQ ID NO: 424 - DNA, 18 bp, Artificial Sequence
  Antisense Oligonucleotide
acaaccaatttctattta

SEQ ID NO: 425 - DNA, 19 bp, Artificial Sequence
  Antisense Oligonucleotide
aacaaccaatttctattta

SEQ ID NO: 426 - DNA, 18 bp, Artificial Sequence
  Antisense Oligonucleotide
tctaaacaaccaatttct

SEQ ID NO: 427 - DNA, 20 bp, Artificial Sequence
  Antisense Oligonucleotide
aacactaccatatatttcat

SEQ ID NO: 428 - DNA, 19 bp, Artificial Sequence
  Antisense Oligonucleotide
aacactaccatatatttca

SEQ ID NO: 429 - DNA, 18 bp, Artificial Sequence
  Antisense Oligonucleotide
aacactaccatatatttc

SEQ ID NO: 430 - DNA, 18 bp, Artificial Sequence
  Antisense Oligonucleotide
ccctcatattctataata

SEQ ID NO: 431 - DNA, 16 bp, Artificial Sequence
  Antisense Oligonucleotide
ccctcatattctataa

SEQ ID NO: 432 - DNA, 19 bp, Artificial Sequence
  Antisense Oligonucleotide
aaaattaatttatttccca

SEQ ID NO: 433 - DNA, 19 bp, Artificial Sequence
  Antisense Oligonucleotide
gaaaattaatttatttccc

SEQ ID NO: 434 - DNA, 19 bp, Artificial Sequence
  Antisense Oligonucleotide
gaaaatacttaacattata

SEQ ID NO: 435 - DNA, 18 bp, Artificial Sequence
  Antisense Oligonucleotide
tgatattcctaatcttct

SEQ ID NO: 436 - DNA, 18 bp, Artificial Sequence
  Antisense Oligonucleotide
ttgatattcctaatcttc

SEQ ID NO: 437 - DNA, 17 bp, Artificial Sequence
  Antisense Oligonucleotide
ttgatattcctaatctt

SEQ ID NO: 438 - DNA, 17 bp, Artificial Sequence
  Antisense Oligonucleotide
ccagatcaaacattaaa

SEQ ID NO: 439 - DNA, 18 bp, Artificial Sequence
  Antisense Oligonucleotide
ttattctatcaattataa

SEQ ID NO: 440 - DNA, 19 bp, Artificial Sequence
  Antisense Oligonucleotide
tttattctatcaattataa

SEQ ID NO: 441 - DNA, 20 bp, Artificial Sequence
  Antisense Oligonucleotide
ttttattctatcaattataa

SEQ ID NO: 442 - DNA, 20 bp, Artificial Sequence
  Antisense Oligonucleotide
attttattctatcaattata

SEQ ID NO: 443 - DNA, 18 bp, Artificial Sequence
  Antisense Oligonucleotide
tttattctatcaattata

SEQ ID NO: 444 - DNA, 19 bp, Artificial Sequence
  Antisense Oligonucleotide
ttttattctatcaattata

SEQ ID NO: 445 - DNA, 19 bp, Artificial Sequence
  Antisense Oligonucleotide
attttattctatcaattat

SEQ ID NO: 446 - DNA, 18 bp, Artificial Sequence
  Antisense Oligonucleotide
gattttattctatcaatt

SEQ ID NO: 447 - DNA, 18 bp, Artificial Sequence
  Antisense Oligonucleotide
ctgattttattctatcaa

SEQ ID NO: 448 - DNA, 19 bp, Artificial Sequence
  Antisense Oligonucleotide
gcaaaaataattccataca

SEQ ID NO: 449 - DNA, 19 bp, Artificial Sequence
  Antisense Oligonucleotide
tactaacttctctcccaat

SEQ ID NO: 450 - DNA, 20 bp, Artificial Sequence
  Antisense Oligonucleotide
atactaacttctctcccaat

SEQ ID NO: 451 - DNA, 17 bp, Artificial Sequence
  Antisense Oligonucleotide
actaacttctctcccaa

SEQ ID NO: 452 - DNA, 19 bp, Artificial Sequence
  Antisense Oligonucleotide
atactaacttctctcccaa

SEQ ID NO: 453 - DNA, 20 bp, Artificial Sequence
  Antisense Oligonucleotide
catactaacttctctcccaa

SEQ ID NO: 454 - DNA, 19 bp, Artificial Sequence
  Antisense Oligonucleotide
catactaacttctctccca

SEQ ID NO: 455 - DNA, 20 bp, Artificial Sequence
  Antisense Oligonucleotide
atcatactaacttctctccc

SEQ ID NO: 456 - DNA, 18 bp, Artificial Sequence
  Antisense Oligonucleotide
catactaacttctctccc

SEQ ID NO: 457 - DNA, 20 bp, Artificial Sequence
  Antisense Oligonucleotide
tatcatactaacttctctcc

SEQ ID NO: 458 - DNA, 18 bp, Artificial Sequence
  Antisense Oligonucleotide
tcatactaacttctctcc

SEQ ID NO: 459 - DNA, 19 bp, Artificial Sequence
  Antisense Oligonucleotide
atcatactaacttctctcc

SEQ ID NO: 460 - DNA, 20 bp, Artificial Sequence
  Antisense Oligonucleotide
atatcatactaacttctctc

SEQ ID NO: 461 - DNA, 18 bp, Artificial Sequence
  Antisense Oligonucleotide
atcatactaacttctctc

SEQ ID NO: 462 - DNA, 19 bp, Artificial Sequence
  Antisense Oligonucleotide
atatcatactaacttctct

SEQ ID NO: 463 - DNA, 17 bp, Artificial Sequence
  Antisense Oligonucleotide
tatcatactaacttctc

SEQ ID NO: 464 - DNA, 18 bp, Artificial Sequence
  Antisense Oligonucleotide
attatatatccttaacta

SEQ ID NO: 465 - DNA, 19 bp, Artificial Sequence
  Antisense Oligonucleotide
cattatatatccttaacta

SEQ ID NO: 466 - DNA, 20 bp, Artificial Sequence
  Antisense Oligonucleotide
acattatatatccttaacta

SEQ ID NO: 467 - DNA, 18 bp, Artificial Sequence
  Antisense Oligonucleotide
cattatatatccttaact

SEQ ID NO: 468 - DNA, 19 bp, Artificial Sequence
  Antisense Oligonucleotide
acattatatatccttaact

SEQ ID NO: 469 - DNA, 20 bp, Artificial Sequence
  Antisense Oligonucleotide
cacattatatatccttaact

SEQ ID NO: 470 - DNA, 17 bp, Artificial Sequence
  Antisense Oligonucleotide
cattatatatccttaac

SEQ ID NO: 471 - DNA, 18 bp, Artificial Sequence
  Antisense Oligonucleotide
acattatatatccttaac

SEQ ID NO: 472 - DNA, 19 bp, Artificial Sequence
  Antisense Oligonucleotide
cacattatatatccttaac

SEQ ID NO: 473 - DNA, 20 bp, Artificial Sequence
  Antisense Oligonucleotide
ccacattatatatccttaac

SEQ ID NO: 474 - DNA, 18 bp, Artificial Sequence
  Antisense Oligonucleotide
cacattatatatccttaa

SEQ ID NO: 475 - DNA, 19 bp, Artificial Sequence
  Antisense Oligonucleotide
ccacattatatatccttaa

SEQ ID NO: 476 - DNA, 18 bp, Artificial Sequence
  Antisense Oligonucleotide
ccacattatatatcctta

SEQ ID NO: 477 - DNA, 19 bp, Artificial Sequence
  Antisense Oligonucleotide
gccacattatatatcctta

SEQ ID NO: 478 - DNA, 18 bp, Artificial Sequence
  Antisense Oligonucleotide
gccacattatatatcctt

SEQ ID NO: 479 - DNA, 17 bp, Artificial Sequence
  Antisense Oligonucleotide
gccacattatatatcct

SEQ ID NO: 480 - DNA, 18 bp, Artificial Sequence
  Antisense Oligonucleotide
tcaattaaataaacctct

SEQ ID NO: 481 - DNA, 17 bp, Artificial Sequence
  Antisense Oligonucleotide
catatactccattaccc

SEQ ID NO: 482 - DNA, 18 bp, Artificial Sequence
  Antisense Oligonucleotide
ccatatactccattaccc

SEQ ID NO: 483 - DNA, 18 bp, Artificial Sequence
  Antisense Oligonucleotide
cccatatactccattacc

SEQ ID NO: 484 - DNA, 17 bp, Artificial Sequence
  Antisense Oligonucleotide
cccatatactccattac

SEQ ID NO: 485 - DNA, 18 bp, Artificial Sequence
  Antisense Oligonucleotide
cattcccatatactccat

SEQ ID NO: 486 - DNA, 18 bp, Artificial Sequence
  Antisense Oligonucleotide
atcttacattcacatatt

SEQ ID NO: 487 - DNA, 20 bp, Artificial Sequence
  Antisense Oligonucleotide
taaatcttacattcacatat

SEQ ID NO: 488 - DNA, 18 bp, Artificial Sequence
  Antisense Oligonucleotide
taaatcttacattcacat

SEQ ID NO: 489 - DNA, 20 bp, Artificial Sequence
  Antisense Oligonucleotide
tacattaatctataattaaa

SEQ ID NO: 490 - DNA, 19 bp, Artificial Sequence
  Antisense Oligonucleotide
tacattaatctataattaa

SEQ ID NO: 491 - DNA, 18 bp, Artificial Sequence
  Antisense Oligonucleotide
gtacattaatctataatt

SEQ ID NO: 492 - DNA, 18 bp, Artificial Sequence
  Antisense Oligonucleotide
tgtacattaatctataat

SEQ ID NO: 493 - DNA, 18 bp, Artificial Sequence
  Antisense Oligonucleotide
atgtacattaatctataa

SEQ ID NO: 494 - DNA, 19 bp, Artificial Sequence
  Antisense Oligonucleotide
taaaataacattatactca

SEQ ID NO: 495 - DNA, 19 bp, Artificial Sequence
  Antisense Oligonucleotide
gtaaaataacattatactc

SEQ ID NO: 496 - DNA, 18 bp, Artificial Sequence
  Antisense Oligonucleotide
gtaaaataacattatact

SEQ ID NO: 497 - DNA, 19 bp, Artificial Sequence
  Antisense Oligonucleotide
tatattattttcatacttt

SEQ ID NO: 498 - DNA, 20 bp, Artificial Sequence
  Antisense Oligonucleotide
ctatattattttcatacttt

SEQ ID NO: 499 - DNA, 19 bp, Artificial Sequence
  Antisense Oligonucleotide
ctatattattttcatactt

SEQ ID NO: 500 - DNA, 20 bp, Artificial Sequence
  Antisense Oligonucleotide
cctatattattttcatactt

SEQ ID NO: 501 - DNA, 18 bp, Artificial Sequence
  Antisense Oligonucleotide
ctatattattttcatact

SEQ ID NO: 502 - DNA, 19 bp, Artificial Sequence
  Antisense Oligonucleotide
cctatattattttcatact

SEQ ID NO: 503 - DNA, 20 bp, Artificial Sequence
  Antisense Oligonucleotide
acctatattattttcatact

SEQ ID NO: 504 - DNA, 18 bp, Artificial Sequence
  Antisense Oligonucleotide
cctatattattttcatac

SEQ ID NO: 505 - DNA, 19 bp, Artificial Sequence
  Antisense Oligonucleotide
acctatattattttcatac

SEQ ID NO: 506 - DNA, 20 bp, Artificial Sequence
  Antisense Oligonucleotide
cacctatattattttcatac

SEQ ID NO: 507 - DNA, 19 bp, Artificial Sequence
  Antisense Oligonucleotide
cacctatattattttcata

SEQ ID NO: 508 - DNA, 20 bp, Artificial Sequence
  Antisense Oligonucleotide
acacctatattattttcata

SEQ ID NO: 509 - DNA, 18 bp, Artificial Sequence
  Antisense Oligonucleotide
cacctatattattttcat

SEQ ID NO: 510 - DNA, 19 bp, Artificial Sequence
  Antisense Oligonucleotide
acacctatattattttcat

SEQ ID NO: 511 - DNA, 19 bp, Artificial Sequence
  Antisense Oligonucleotide
gacacctatattattttca

SEQ ID NO: 512 - DNA, 18 bp, Artificial Sequence
  Antisense Oligonucleotide
gacacctatattattttc

SEQ ID NO: 513 - DNA, 18 bp, Artificial Sequence
  Antisense Oligonucleotide
tgacacctatattatttt

SEQ ID NO: 514 - DNA, 17 bp, Artificial Sequence
  Antisense Oligonucleotide
atcactgacacctatat

SEQ ID NO: 515 - DNA, 18 bp, Artificial Sequence
  Antisense Oligonucleotide
gctaaatattactcactc

SEQ ID NO: 516 - DNA, 18 bp, Artificial Sequence
  Antisense Oligonucleotide
ttgctaaatattactcac

SEQ ID NO: 517 - DNA, 18 bp, Artificial Sequence
  Antisense Oligonucleotide
cttgctaaatattactca

SEQ ID NO: 518 - DNA, 18 bp, Artificial Sequence
  Antisense Oligonucleotide
cacattaactactcatat

SEQ ID NO: 519 - DNA, 19 bp, Artificial Sequence
  Antisense Oligonucleotide
acacattaactactcatat

SEQ ID NO: 520 - DNA, 20 bp, Artificial Sequence
  Antisense Oligonucleotide
tacacattaactactcatat

SEQ ID NO: 521 - DNA, 17 bp, Artificial Sequence
  Antisense Oligonucleotide
cacattaactactcata

SEQ ID NO: 522 - DNA, 18 bp, Artificial Sequence
  Antisense Oligonucleotide
acacattaactactcata

SEQ ID NO: 523 - DNA, 19 bp, Artificial Sequence
  Antisense Oligonucleotide
tacacattaactactcata

SEQ ID NO: 524 - DNA, 18 bp, Artificial Sequence
  Antisense Oligonucleotide
tacacattaactactcat

SEQ ID NO: 525 - DNA, 19 bp, Artificial Sequence
  Antisense Oligonucleotide
gtacacattaactactcat

SEQ ID NO: 526 - DNA, 19 bp, Artificial Sequence
  Antisense Oligonucleotide
agtacacattaactactca

SEQ ID NO: 527 - DNA, 17 bp, Artificial Sequence
  Antisense Oligonucleotide
gtacacattaactactc

SEQ ID NO: 528 - DNA, 18 bp, Artificial Sequence
  Antisense Oligonucleotide
agtacacattaactactc

SEQ ID NO: 529 - DNA, 20 bp, Artificial Sequence
  Antisense Oligonucleotide
tatatcttcattattttccc

SEQ ID NO: 530 - DNA, 19 bp, Artificial Sequence
  Antisense Oligonucleotide
tatatcttcattattttcc

SEQ ID NO: 531 - DNA, 18 bp, Artificial Sequence
  Antisense Oligonucleotide
catatatcttcattattt

SEQ ID NO: 532 - DNA, 20 bp, Artificial Sequence
  Antisense Oligonucleotide
atcatatatcttcattattt

SEQ ID NO: 533 - DNA, 20 bp, Artificial Sequence
  Antisense Oligonucleotide
aatcatatatcttcattatt

SEQ ID NO: 534 - DNA, 18 bp, Artificial Sequence
  Antisense Oligonucleotide
caatacaacttaattcca

SEQ ID NO: 535 - DNA, 17 bp, Artificial Sequence
  Antisense Oligonucleotide
caacccactaaataata

SEQ ID NO: 536 - DNA, 18 bp, Artificial Sequence
  Antisense Oligonucleotide
gcaacccactaaataata

SEQ ID NO: 537 - DNA, 17 bp, Artificial Sequence
  Antisense Oligonucleotide
gcaacccactaaataat

SEQ ID NO: 538 - DNA, 17 bp, Artificial Sequence
  Antisense Oligonucleotide
agcaacccactaaataa

SEQ ID NO: 539 - DNA, 20 bp, Artificial Sequence
  Antisense Oligonucleotide
tcttaatttttttctattat

SEQ ID NO: 540 - DNA, 20 bp, Artificial Sequence
  Antisense Oligonucleotide
ctcttaatttttttctatta

SEQ ID NO: 541 - DNA, 20 bp, Artificial Sequence
  Antisense Oligonucleotide
atctcttaatttttttctat

SEQ ID NO: 542 - DNA, 20 bp, Artificial Sequence
  Antisense Oligonucleotide
aatctcttaatttttttcta

SEQ ID NO: 543 - DNA, 19 bp, Artificial Sequence
  Antisense Oligonucleotide
caatctcttaatttttttc

SEQ ID NO: 544 - DNA, 20 bp, Artificial Sequence
  Antisense Oligonucleotide
tcaatctcttaatttttttc

SEQ ID NO: 545 - DNA, 20 bp, Artificial Sequence
  Antisense Oligonucleotide
atactcaatctcttaatttt

SEQ ID NO: 546 - DNA, 19 bp, Artificial Sequence
  Antisense Oligonucleotide
atactcaatctcttaattt

SEQ ID NO: 547 - DNA, 18 bp, Artificial Sequence
  Antisense Oligonucleotide
atactcaatctcttaatt

SEQ ID NO: 548 - DNA, 19 bp, Artificial Sequence
  Antisense Oligonucleotide
gatactcaatctcttaatt

SEQ ID NO: 549 - DNA, 18 bp, Artificial Sequence
  Antisense Oligonucleotide
gatactcaatctcttaat

SEQ ID NO: 550 - DNA, 17 bp, Artificial Sequence
  Antisense Oligonucleotide
gatactcaatctcttaa

SEQ ID NO: 551 - DNA, 19 bp, Artificial Sequence
  Antisense Oligonucleotide
aaatattcttacttctatt

SEQ ID NO: 552 - DNA, 20 bp, Artificial Sequence
  Antisense Oligonucleotide
aaaatattcttacttctatt

SEQ ID NO: 553 - DNA, 18 bp, Artificial Sequence
  Antisense Oligonucleotide
aaatattcttacttctat

SEQ ID NO: 554 - DNA, 19 bp, Artificial Sequence
  Antisense Oligonucleotide
aaaatattcttacttctat

SEQ ID NO: 555 - DNA, 20 bp, Artificial Sequence
  Antisense Oligonucleotide
caaaatattcttacttctat

SEQ ID NO: 556 - DNA, 19 bp, Artificial Sequence
  Antisense Oligonucleotide
caaaatattcttacttcta

SEQ ID NO: 557 - DNA, 20 bp, Artificial Sequence
  Antisense Oligonucleotide
tcaaaatattcttacttcta

SEQ ID NO: 558 - DNA, 19 bp, Artificial Sequence
  Antisense Oligonucleotide
tcaaaatattcttacttct

SEQ ID NO: 559 - DNA, 19 bp, Artificial Sequence
  Antisense Oligonucleotide
gtcaaaatattcttacttc

SEQ ID NO: 560 - DNA, 18 bp, Artificial Sequence
  Antisense Oligonucleotide
taaatattccttaaccta

SEQ ID NO: 561 - DNA, 19 bp, Artificial Sequence
  Antisense Oligonucleotide
ttaaatattccttaaccta

SEQ ID NO: 562 - DNA, 20 bp, Artificial Sequence
  Antisense Oligonucleotide
tttaaatattccttaaccta

SEQ ID NO: 563 - DNA, 18 bp, Artificial Sequence
  Antisense Oligonucleotide
ttaaatattccttaacct

SEQ ID NO: 564 - DNA, 20 bp, Artificial Sequence
  Antisense Oligonucleotide
atttaaatattccttaacct

SEQ ID NO: 565 - DNA, 18 bp, Artificial Sequence
  Antisense Oligonucleotide
tttaaatattccttaacc

SEQ ID NO: 566 - DNA, 19 bp, Artificial Sequence
  Antisense Oligonucleotide
atttaaatattccttaacc

SEQ ID NO: 567 - DNA, 20 bp, Artificial Sequence
  Antisense Oligonucleotide
tatttaaatattccttaacc

SEQ ID NO: 568 - DNA, 20 bp, Artificial Sequence
  Antisense Oligonucleotide
ttatttaaatattccttaac

SEQ ID NO: 569 - DNA, 19 bp, Artificial Sequence
  Antisense Oligonucleotide
ttatttaaatattccttaa

SEQ ID NO: 570 - DNA, 20 bp, Artificial Sequence
  Antisense Oligonucleotide
tttatttaaatattccttaa

SEQ ID NO: 571 - DNA, 19 bp, Artificial Sequence
  Antisense Oligonucleotide
tttatttaaatattcctta

SEQ ID NO: 572 - DNA, 20 bp, Artificial Sequence
  Antisense Oligonucleotide
ttttatttaaatattcctta

SEQ ID NO: 573 - DNA, 20 bp, Artificial Sequence
  Antisense Oligonucleotide
attattttatttaaatattc

SEQ ID NO: 574 - DNA, 20 bp, Artificial Sequence
  Antisense Oligonucleotide
acattattttatttaaatat

SEQ ID NO: 575 - DNA, 20 bp, Artificial Sequence
  Antisense Oligonucleotide
cacattattttatttaaata

SEQ ID NO: 576 - DNA, 20 bp, Artificial Sequence
  Antisense Oligonucleotide
ccacattattttatttaaat

SEQ ID NO: 577 - DNA, 19 bp, Artificial Sequence
  Antisense Oligonucleotide
tttcccacataaaattaaa

SEQ ID NO: 578 - DNA, 20 bp, Artificial Sequence
  Antisense Oligonucleotide
atttcccacataaaattaaa

SEQ ID NO: 579 - DNA, 20 bp, Artificial Sequence
  Antisense Oligonucleotide
tatttcccacataaaattaa

SEQ ID NO: 580 - DNA, 19 bp, Artificial Sequence
  Antisense Oligonucleotide
ttatttcccacataaaatt

SEQ ID NO: 581 - DNA, 20 bp, Artificial Sequence
  Antisense Oligonucleotide
tttatttcccacataaaatt

SEQ ID NO: 582 - DNA, 19 bp, Artificial Sequence
  Antisense Oligonucleotide
tttatttcccacataaaat

SEQ ID NO: 583 - DNA, 20 bp, Artificial Sequence
  Antisense Oligonucleotide
atttatttcccacataaaat

SEQ ID NO: 584 - DNA, 19 bp, Artificial Sequence
  Antisense Oligonucleotide
atttatttcccacataaaa

SEQ ID NO: 585 - DNA, 20 bp, Artificial Sequence
  Antisense Oligonucleotide
tatttatttcccacataaaa

SEQ ID NO: 586 - DNA, 19 bp, Artificial Sequence
  Antisense Oligonucleotide
tatttatttcccacataaa

SEQ ID NO: 587 - DNA, 20 bp, Artificial Sequence
  Antisense Oligonucleotide
ctatttatttcccacataaa

SEQ ID NO: 588 - DNA, 19 bp, Artificial Sequence
  Antisense Oligonucleotide
ctatttatttcccacataa

SEQ ID NO: 589 - DNA, 20 bp, Artificial Sequence
  Antisense Oligonucleotide
tctatttatttcccacataa

SEQ ID NO: 590 - DNA, 18 bp, Artificial Sequence
  Antisense Oligonucleotide
ctatttatttcccacata

SEQ ID NO: 591 - DNA, 19 bp, Artificial Sequence
  Antisense Oligonucleotide
tctatttatttcccacata

SEQ ID NO: 592 - DNA, 19 bp, Artificial Sequence
  Antisense Oligonucleotide
ctctatttatttcccacat

SEQ ID NO: 593 - DNA, 18 bp, Artificial Sequence
  Antisense Oligonucleotide
ctctatttatttcccaca

SEQ ID NO: 594 - DNA, 18 bp, Artificial Sequence
  Antisense Oligonucleotide
cttcaatattattatcct

SEQ ID NO: 595 - DNA, 20 bp, Artificial Sequence
  Antisense Oligonucleotide
aacttcaatattattatcct

SEQ ID NO: 596 - DNA, 19 bp, Artificial Sequence
  Antisense Oligonucleotide
aacttcaatattattatcc

SEQ ID NO: 597 - DNA, 20 bp, Artificial Sequence
  Antisense Oligonucleotide
taacttcaatattattatcc

SEQ ID NO: 598 - DNA, 18 bp, Artificial Sequence
  Antisense Oligonucleotide
aacttcaatattattatc

SEQ ID NO: 599 - DNA, 19 bp, Artificial Sequence
  Antisense Oligonucleotide
taacttcaatattattatc

SEQ ID NO: 600 - DNA, 20 bp, Artificial Sequence
  Antisense Oligonucleotide
ttaacttcaatattattatc

SEQ ID NO: 601 - DNA, 19 bp, Artificial Sequence
  Antisense Oligonucleotide
ttaacttcaatattattat

SEQ ID NO: 602 - DNA, 20 bp, Artificial Sequence
  Antisense Oligonucleotide
cttaacttcaatattattat

SEQ ID NO: 603 - DNA, 19 bp, Artificial Sequence
  Antisense Oligonucleotide
cttaacttcaatattatta

SEQ ID NO: 604 - DNA, 20 bp, Artificial Sequence
  Antisense Oligonucleotide
ccttaacttcaatattatta

SEQ ID NO: 605 - DNA, 19 bp, Artificial Sequence
  Antisense Oligonucleotide
ccttaacttcaatattatt

SEQ ID NO: 606 - DNA, 20 bp, Artificial Sequence
  Antisense Oligonucleotide
tccttaacttcaatattatt

SEQ ID NO: 607 - DNA, 20 bp, Artificial Sequence
  Antisense Oligonucleotide
atccttaacttcaatattat

SEQ ID NO: 608 - DNA, 19 bp, Artificial Sequence
  Antisense Oligonucleotide
atccttaacttcaatatta

SEQ ID NO: 609 - DNA, 20 bp, Artificial Sequence
  Antisense Oligonucleotide
catccttaacttcaatatta

SEQ ID NO: 610 - DNA, 18 bp, Artificial Sequence
  Antisense Oligonucleotide
atccttaacttcaatatt

SEQ ID NO: 611 - DNA, 19 bp, Artificial Sequence
  Antisense Oligonucleotide
catccttaacttcaatatt

SEQ ID NO: 612 - DNA, 20 bp, Artificial Sequence
  Antisense Oligonucleotide
tcatccttaacttcaatatt

SEQ ID NO: 613 - DNA, 18 bp, Artificial Sequence
  Antisense Oligonucleotide
catccttaacttcaatat

SEQ ID NO: 614 - DNA, 19 bp, Artificial Sequence
  Antisense Oligonucleotide
tcatccttaacttcaatat

SEQ ID NO: 615 - DNA, 20 bp, Artificial Sequence
  Antisense Oligonucleotide
atcatccttaacttcaatat

SEQ ID NO: 616 - DNA, 17 bp, Artificial Sequence
  Antisense Oligonucleotide
catccttaacttcaata

SEQ ID NO: 617 - DNA, 18 bp, Artificial Sequence
  Antisense Oligonucleotide
tcatccttaacttcaata

SEQ ID NO: 618 - DNA, 19 bp, Artificial Sequence
  Antisense Oligonucleotide
atcatccttaacttcaata

SEQ ID NO: 619 - DNA, 17 bp, Artificial Sequence
  Antisense Oligonucleotide
tcatccttaacttcaat

SEQ ID NO: 620 - DNA, 18 bp, Artificial Sequence
  Antisense Oligonucleotide
atcatccttaacttcaat

SEQ ID NO: 621 - DNA, 17 bp, Artificial Sequence
  Antisense Oligonucleotide
atcatccttaacttcaa

SEQ ID NO: 622 - DNA, 17 bp, Artificial Sequence
  Antisense Oligonucleotide
ccattgatttaatacat

SEQ ID NO: 623 - DNA, 18 bp, Artificial Sequence
  Antisense Oligonucleotide
tgttcataactatatcca

SEQ ID NO: 624 - DNA, 18 bp, Artificial Sequence
  Antisense Oligonucleotide
gttatatactctattaat

SEQ ID NO: 625 - DNA, 19 bp, Artificial Sequence
  Antisense Oligonucleotide
taaaattaaatttaatcca

SEQ ID NO: 626 - DNA, 20 bp, Artificial Sequence
  Antisense Oligonucleotide
ttaaaattaaatttaatcca

SEQ ID NO: 627 - DNA, 20 bp, Artificial Sequence
  Antisense Oligonucleotide
tttaaaattaaatttaatcc

SEQ ID NO: 628 - DNA, 19 bp, Artificial Sequence
  Antisense Oligonucleotide
tacctaccaactttcttta

SEQ ID NO: 629 - DNA, 17 bp, Artificial Sequence
  Antisense Oligonucleotide
cctaccaactttcttta

SEQ ID NO: 630 - DNA, 18 bp, Artificial Sequence
  Antisense Oligonucleotide
acctaccaactttcttta

SEQ ID NO: 631 - DNA, 18 bp, Artificial Sequence
  Antisense Oligonucleotide
tacctaccaactttcttt

SEQ ID NO: 632 - DNA, 18 bp, Artificial Sequence
  Antisense Oligonucleotide
tagaatttaaacattatc

SEQ ID NO: 633 - DNA, 18 bp, Artificial Sequence
  Antisense Oligonucleotide
ttgtactctacatattta

SEQ ID NO: 634 - DNA, 20 bp, Artificial Sequence
  Antisense Oligonucleotide
tacacacacatatattcatc

SEQ ID NO: 635 - DNA, 19 bp, Artificial Sequence
  Antisense Oligonucleotide
cctaaaaatccattcccaa

SEQ ID NO: 636 - DNA, 18 bp, Artificial Sequence
  Antisense Oligonucleotide
cctaaaaatccattccca

SEQ ID NO: 637 - DNA, 18 bp, Artificial Sequence
  Antisense Oligonucleotide
gcattattaatacacctc

SEQ ID NO: 638 - DNA, 19 bp, Artificial Sequence
  Antisense Oligonucleotide
tgcattattaatacacctc

SEQ ID NO: 639 - DNA, 17 bp, Artificial Sequence
  Antisense Oligonucleotide
gcattattaatacacct

SEQ ID NO: 640 - DNA, 18 bp, Artificial Sequence
  Antisense Oligonucleotide
tgcattattaatacacct

SEQ ID NO: 641 - DNA, 17 bp, Artificial Sequence
  Antisense Oligonucleotide
tgcattattaatacacc

SEQ ID NO: 642 - DNA, 18 bp, Artificial Sequence
  Antisense Oligonucleotide
gttcattatattaattaa

SEQ ID NO: 643 - DNA, 18 bp, Artificial Sequence
  Antisense Oligonucleotide
ccaacttacaattctcct

SEQ ID NO: 644 - DNA, 17 bp, Artificial Sequence
  Antisense Oligonucleotide
ccaacttacaattctcc

SEQ ID NO: 645 - DNA, 17 bp, Artificial Sequence
  Antisense Oligonucleotide
cccaacttacaattctc

SEQ ID NO: 646 - DNA, 18 bp, Artificial Sequence
  Antisense Oligonucleotide
taacactatttaatatac

SEQ ID NO: 647 - DNA, 19 bp, Artificial Sequence
  Antisense Oligonucleotide
ttaacactatttaatatac

SEQ ID NO: 648 - DNA, 20 bp, Artificial Sequence
  Antisense Oligonucleotide
tttaacactatttaatatac

SEQ ID NO: 649 - DNA, 19 bp, Artificial Sequence
  Antisense Oligonucleotide
tttaacactatttaatata

SEQ ID NO: 650 - DNA, 20 bp, Artificial Sequence
  Antisense Oligonucleotide
atttaacactatttaatata

SEQ ID NO: 651 - DNA, 19 bp, Artificial Sequence
  Antisense Oligonucleotide
atttaacactatttaatat

SEQ ID NO: 652 - DNA, 20 bp, Artificial Sequence
  Antisense Oligonucleotide
catttaacactatttaatat

SEQ ID NO: 653 - DNA, 19 bp, Artificial Sequence
  Antisense Oligonucleotide
catttaacactatttaata

SEQ ID NO: 654 - DNA, 20 bp, Artificial Sequence
  Antisense Oligonucleotide
tcatttaacactatttaata

SEQ ID NO: 655 - DNA, 19 bp, Artificial Sequence
  Antisense Oligonucleotide
tcatttaacactatttaat

SEQ ID NO: 656 - DNA, 20 bp, Artificial Sequence
  Antisense Oligonucleotide
ttcatttaacactatttaat

SEQ ID NO: 657 - DNA, 20 bp, Artificial Sequence
  Antisense Oligonucleotide
attcatttaacactatttaa

SEQ ID NO: 658 - DNA, 20 bp, Artificial Sequence
  Antisense Oligonucleotide
cattcatttaacactattta

SEQ ID NO: 659 - DNA, 19 bp, Artificial Sequence
  Antisense Oligonucleotide
cattcatttaacactattt

SEQ ID NO: 660 - DNA, 20 bp, Artificial Sequence
  Antisense Oligonucleotide
acattcatttaacactattt

SEQ ID NO: 661 - DNA, 19 bp, Artificial Sequence
  Antisense Oligonucleotide
acattcatttaacactatt

SEQ ID NO: 662 - DNA, 19 bp, Artificial Sequence
  Antisense Oligonucleotide
gacattcatttaacactat

SEQ ID NO: 663 - DNA, 18 bp, Artificial Sequence
  Antisense Oligonucleotide
gacattcatttaacacta

SEQ ID NO: 664 - DNA, 18 bp, Artificial Sequence
  Antisense Oligonucleotide
tgacattcatttaacact

SEQ ID NO: 665 - DNA, 18 bp, Artificial Sequence
  Antisense Oligonucleotide
aaatttctatactcccat

SEQ ID NO: 666 - DNA, 19 bp, Artificial Sequence
  Antisense Oligonucleotide
aaaatttctatactcccat

SEQ ID NO: 667 - DNA, 20 bp, Artificial Sequence
  Antisense Oligonucleotide
taaaatttctatactcccat

SEQ ID NO: 668 - DNA, 18 bp, Artificial Sequence
  Antisense Oligonucleotide
aaaatttctatactccca

SEQ ID NO: 669 - DNA, 19 bp, Artificial Sequence
  Antisense Oligonucleotide
taaaatttctatactccca

SEQ ID NO: 670 - DNA, 20 bp, Artificial Sequence
  Antisense Oligonucleotide
ataaaatttctatactccca

SEQ ID NO: 671 - DNA, 20 bp, Artificial Sequence
  Antisense Oligonucleotide
tataaaatttctatactccc

SEQ ID NO: 672 - DNA, 18 bp, Artificial Sequence
  Antisense Oligonucleotide
taaaatttctatactccc

SEQ ID NO: 673 - DNA, 19 bp, Artificial Sequence
  Antisense Oligonucleotide
ataaaatttctatactccc

SEQ ID NO: 674 - DNA, 18 bp, Artificial Sequence
  Antisense Oligonucleotide
ataaaatttctatactcc

SEQ ID NO: 675 - DNA, 19 bp, Artificial Sequence
  Antisense Oligonucleotide
tataaaatttctatactcc

SEQ ID NO: 676 - DNA, 20 bp, Artificial Sequence
  Antisense Oligonucleotide
ttataaaatttctatactcc

SEQ ID NO: 677 - DNA, 18 bp, Artificial Sequence
  Antisense Oligonucleotide
tataaaatttctatactc

SEQ ID NO: 678 - DNA, 19 bp, Artificial Sequence
  Antisense Oligonucleotide
ttataaaatttctatactc

SEQ ID NO: 679 - DNA, 20 bp, Artificial Sequence
  Antisense Oligonucleotide
cttataaaatttctatactc

SEQ ID NO: 680 - DNA, 19 bp, Artificial Sequence
  Antisense Oligonucleotide
cttataaaatttctatact

SEQ ID NO: 681 - DNA, 20 bp, Artificial Sequence
  Antisense Oligonucleotide
tcttataaaatttctatact

SEQ ID NO: 682 - DNA, 18 bp, Artificial Sequence
  Antisense Oligonucleotide
cttataaaatttctatac

SEQ ID NO: 683 - DNA, 19 bp, Artificial Sequence
  Antisense Oligonucleotide
tcttataaaatttctatac

SEQ ID NO: 684 - DNA, 20 bp, Artificial Sequence
  Antisense Oligonucleotide
ttcttataaaatttctatac

SEQ ID NO: 685 - DNA, 19 bp, Artificial Sequence
  Antisense Oligonucleotide
ttcttataaaatttctata

SEQ ID NO: 686 - DNA, 20 bp, Artificial Sequence
  Antisense Oligonucleotide
cttcttataaaatttctata

SEQ ID NO: 687 - DNA, 18 bp, Artificial Sequence
  Antisense Oligonucleotide
tgtcttcttataaaattt

SEQ ID NO: 688 - DNA, 18 bp, Artificial Sequence
  Antisense Oligonucleotide
acaataacattcaaacat

SEQ ID NO: 689 - DNA, 19 bp, Artificial Sequence
  Antisense Oligonucleotide
cacaataacattcaaacat

SEQ ID NO: 690 - DNA, 20 bp, Artificial Sequence
  Antisense Oligonucleotide
acacaataacattcaaacat

SEQ ID NO: 691 - DNA, 18 bp, Artificial Sequence
  Antisense Oligonucleotide
cacaataacattcaaaca

SEQ ID NO: 692 - DNA, 19 bp, Artificial Sequence
  Antisense Oligonucleotide
acacaataacattcaaaca

SEQ ID NO: 693 - DNA, 20 bp, Artificial Sequence
  Antisense Oligonucleotide
catattaaatatcttctcta

SEQ ID NO: 694 - DNA, 18 bp, Artificial Sequence
  Antisense Oligonucleotide
aacttcatattaaatatc

SEQ ID NO: 695 - DNA, 19 bp, Artificial Sequence
  Antisense Oligonucleotide
gaacttcatattaaatatc

SEQ ID NO: 696 - DNA, 18 bp, Artificial Sequence
  Antisense Oligonucleotide
ccaccaaaacacacttca

SEQ ID NO: 697 - DNA, 18 bp, Artificial Sequence
  Antisense Oligonucleotide
gtatttactttattcaca

SEQ ID NO: 698 - DNA, 20 bp, Artificial Sequence
  Antisense Oligonucleotide
ttacttctccaatctttcca

SEQ ID NO: 699 - DNA, 20 bp, Artificial Sequence
  Antisense Oligonucleotide
tttacttctccaatctttcc

SEQ ID NO: 700 - DNA, 20 bp, Artificial Sequence
  Antisense Oligonucleotide
caaaatttacttctccaatc

SEQ ID NO: 701 - DNA, 19 bp, Artificial Sequence
  Antisense Oligonucleotide
caaaatttacttctccaat

SEQ ID NO: 702 - DNA, 20 bp, Artificial Sequence
  Antisense Oligonucleotide
ccaaaatttacttctccaat

SEQ ID NO: 703 - DNA, 18 bp, Artificial Sequence
  Antisense Oligonucleotide
caaaatttacttctccaa

SEQ ID NO: 704 - DNA, 19 bp, Artificial Sequence
  Antisense Oligonucleotide
ccaaaatttacttctccaa

SEQ ID NO: 705 - DNA, 20 bp, Artificial Sequence
  Antisense Oligonucleotide
tccaaaatttacttctccaa

SEQ ID NO: 706 - DNA, 19 bp, Artificial Sequence
  Antisense Oligonucleotide
tccaaaatttacttctcca

SEQ ID NO: 707 - DNA, 20 bp, Artificial Sequence
  Antisense Oligonucleotide
ctccaaaatttacttctcca

SEQ ID NO: 708 - DNA, 20 bp, Artificial Sequence
  Antisense Oligonucleotide
tctccaaaatttacttctcc

SEQ ID NO: 709 - DNA, 18 bp, Artificial Sequence
  Antisense Oligonucleotide
ctccaaaatttacttctc

SEQ ID NO: 710 - DNA, 18 bp, Artificial Sequence
  Antisense Oligonucleotide
tacatctccaaaatttac

SEQ ID NO: 711 - DNA, 20 bp, Artificial Sequence
  Antisense Oligonucleotide
catacatctccaaaatttac

SEQ ID NO: 712 - DNA, 19 bp, Artificial Sequence
  Antisense Oligonucleotide
catacatctccaaaattta

SEQ ID NO: 713 - DNA, 20 bp, Artificial Sequence
  Antisense Oligonucleotide
acatacatctccaaaattta

SEQ ID NO: 714 - DNA, 19 bp, Artificial Sequence
  Antisense Oligonucleotide
acatacatctccaaaattt

SEQ ID NO: 715 - DNA, 19 bp, Artificial Sequence
  Antisense Oligonucleotide
gacatacatctccaaaatt

SEQ ID NO: 716 - DNA, 18 bp, Artificial Sequence
  Antisense Oligonucleotide
gacatacatctccaaaat

SEQ ID NO: 717 - DNA, 19 bp, Artificial Sequence
  Antisense Oligonucleotide
cgacatacatctccaaaat

SEQ ID NO: 718 - DNA, 18 bp, Artificial Sequence
  Antisense Oligonucleotide
cgacatacatctccaaaa

SEQ ID NO: 719 - DNA, 17 bp, Artificial Sequence
  Antisense Oligonucleotide
cgacatacatctccaaa

SEQ ID NO: 720 - DNA, 18 bp, Artificial Sequence
  Antisense Oligonucleotide
ccgacatacatctccaaa

SEQ ID NO: 721 - DNA, 16 bp, Artificial Sequence
  Antisense Oligonucleotide
cgacatacatctccaa

SEQ ID NO: 722 - DNA, 17 bp, Artificial Sequence
  Antisense Oligonucleotide
ccgacatacatctccaa

SEQ ID NO: 723 - DNA, 16 bp, Artificial Sequence
  Antisense Oligonucleotide
ccgacatacatctcca

SEQ ID NO: 724 - DNA, 16 bp, Artificial Sequence
  Antisense Oligonucleotide
gccgacatacatctcc

SEQ ID NO: 725 - DNA, 18 bp, Artificial Sequence
  Antisense Oligonucleotide
tcctacattatttctata

SEQ ID NO: 726 - DNA, 19 bp, Artificial Sequence
  Antisense Oligonucleotide
ttcctacattatttctata

SEQ ID NO: 727 - DNA, 20 bp, Artificial Sequence
  Antisense Oligonucleotide
attcctacattatttctata

SEQ ID NO: 728 - DNA, 20 bp, Artificial Sequence
  Antisense Oligonucleotide
aattcctacattatttctat

SEQ ID NO: 729 - DNA, 19 bp, Artificial Sequence
  Antisense Oligonucleotide
aattcctacattatttcta

SEQ ID NO: 730 - DNA, 20 bp, Artificial Sequence
  Antisense Oligonucleotide
taattcctacattatttcta

SEQ ID NO: 731 - DNA, 19 bp, Artificial Sequence
  Antisense Oligonucleotide
ataattcctacattatttc

SEQ ID NO: 732 - DNA, 20 bp, Artificial Sequence
  Antisense Oligonucleotide
tataattcctacattatttc

SEQ ID NO: 733 - DNA, 18 bp, Artificial Sequence
  Antisense Oligonucleotide
taattcctacattatttc

SEQ ID NO: 734 - DNA, 19 bp, Artificial Sequence
  Antisense Oligonucleotide
tataattcctacattattt

SEQ ID NO: 735 - DNA, 20 bp, Artificial Sequence
  Antisense Oligonucleotide
ttataattcctacattattt

SEQ ID NO: 736 - DNA, 19 bp, Artificial Sequence
  Antisense Oligonucleotide
ttataattcctacattatt

SEQ ID NO: 737 - DNA, 20 bp, Artificial Sequence
  Antisense Oligonucleotide
attataattcctacattatt

SEQ ID NO: 738 - DNA, 19 bp, Artificial Sequence
  Antisense Oligonucleotide
attataattcctacattat

SEQ ID NO: 739 - DNA, 19 bp, Artificial Sequence
  Antisense Oligonucleotide
gattataattcctacatta

SEQ ID NO: 740 - DNA, 18 bp, Artificial Sequence
  Antisense Oligonucleotide
gattataattcctacatt

SEQ ID NO: 741 - DNA, 18 bp, Artificial Sequence
  Antisense Oligonucleotide
aagtactttcacatttcc

SEQ ID NO: 742 - DNA, 19 bp, Artificial Sequence
  Antisense Oligonucleotide
tccttttcatcataaatca

SEQ ID NO: 743 - DNA, 20 bp, Artificial Sequence
  Antisense Oligonucleotide
ttccttttcatcataaatca

SEQ ID NO: 744 - DNA, 19 bp, Artificial Sequence
  Antisense Oligonucleotide
ttccttttcatcataaatc

SEQ ID NO: 745 - DNA, 20 bp, Artificial Sequence
  Antisense Oligonucleotide
attccttttcatcataaatc

SEQ ID NO: 746 - DNA, 20 bp, Artificial Sequence
  Antisense Oligonucleotide
ttattccttttcatcataaa

SEQ ID NO: 747 - DNA, 19 bp, Artificial Sequence
  Antisense Oligonucleotide
ttattccttttcatcataa

SEQ ID NO: 748 - DNA, 18 bp, Artificial Sequence
  Antisense Oligonucleotide
atgttattccttttcatc

SEQ ID NO: 749 - DNA, 16 bp, Artificial Sequence
  Antisense Oligonucleotide
tagtcactatacccct

SEQ ID NO: 750 - DNA, 16 bp, Artificial Sequence
  Antisense Oligonucleotide
ctagtcactatacccc

SEQ ID NO: 751 - DNA, 17 bp, Artificial Sequence
  Antisense Oligonucleotide
ttctagtcactataccc

SEQ ID NO: 752 - DNA, 17 bp, Artificial Sequence
  Antisense Oligonucleotide
acacttgactataacac

SEQ ID NO: 753 - DNA, 18 bp, Artificial Sequence
  Antisense Oligonucleotide
atttatcttctatccaaa

SEQ ID NO: 754 - DNA, 19 bp, Artificial Sequence
  Antisense Oligonucleotide
tatttatcttctatccaaa

SEQ ID NO: 755 - DNA, 20 bp, Artificial Sequence
  Antisense Oligonucleotide
ttatttatcttctatccaaa

SEQ ID NO: 756 - DNA, 19 bp, Artificial Sequence
  Antisense Oligonucleotide
ttatttatcttctatccaa

SEQ ID NO: 757 - DNA, 20 bp, Artificial Sequence
  Antisense Oligonucleotide
attatttatcttctatccaa

SEQ ID NO: 758 - DNA, 19 bp, Artificial Sequence
  Antisense Oligonucleotide
attatttatcttctatcca

SEQ ID NO: 759 - DNA, 20 bp, Artificial Sequence
  Antisense Oligonucleotide
tattatttatcttctatcca

SEQ ID NO: 760 - DNA, 20 bp, Artificial Sequence
  Antisense Oligonucleotide
ttattatttatcttctatcc

SEQ ID NO: 761 - DNA, 20 bp, Artificial Sequence
  Antisense Oligonucleotide
attattatttatcttctatc

SEQ ID NO: 762 - DNA, 19 bp, Artificial Sequence
  Antisense Oligonucleotide
attattatttatcttctat

SEQ ID NO: 763 - DNA, 20 bp, Artificial Sequence
  Antisense Oligonucleotide
aattattatttatcttctat

SEQ ID NO: 764 - DNA, 19 bp, Artificial Sequence
  Antisense Oligonucleotide
aattattatttatcttcta

SEQ ID NO: 765 - DNA, 20 bp, Artificial Sequence
  Antisense Oligonucleotide
aaattattatttatcttcta

SEQ ID NO: 766 - DNA, 20 bp, Artificial Sequence
  Antisense Oligonucleotide
taaattattatttatcttct

SEQ ID NO: 767 - DNA, 20 bp, Artificial Sequence
  Antisense Oligonucleotide
ttaaattattatttatcttc

SEQ ID NO: 768 - DNA, 19 bp, Artificial Sequence
  Antisense Oligonucleotide
taattaattaacctccctt

SEQ ID NO: 769 - DNA, 18 bp, Artificial Sequence
  Antisense Oligonucleotide
taattaattaacctccct

SEQ ID NO: 770 - DNA, 19 bp, Artificial Sequence
  Antisense Oligonucleotide
ttaattaattaacctccct

SEQ ID NO: 771 - DNA, 18 bp, Artificial Sequence
  Antisense Oligonucleotide
ttaattaattaacctccc

SEQ ID NO: 772 - DNA, 19 bp, Artificial Sequence
  Antisense Oligonucleotide
attaattaattaacctccc

SEQ ID NO: 773 - DNA, 20 bp, Artificial Sequence
  Antisense Oligonucleotide
aattaattaattaacctccc

SEQ ID NO: 774 - DNA, 18 bp, Artificial Sequence
  Antisense Oligonucleotide
attaattaattaacctcc

SEQ ID NO: 775 - DNA, 19 bp, Artificial Sequence
  Antisense Oligonucleotide
aattaattaattaacctcc

SEQ ID NO: 776 - DNA, 20 bp, Artificial Sequence
  Antisense Oligonucleotide
taattaattaattaacctcc

SEQ ID NO: 777 - DNA, 19 bp, Artificial Sequence
  Antisense Oligonucleotide
taattaattaattaacctc

SEQ ID NO: 778 - DNA, 20 bp, Artificial Sequence
  Antisense Oligonucleotide
ataattaattaattaacctc

SEQ ID NO: 779 - DNA, 20 bp, Artificial Sequence
  Antisense Oligonucleotide
tataattaattaattaacct

SEQ ID NO: 780 - DNA, 19 bp, Artificial Sequence
  Antisense Oligonucleotide
tataattaattaattaacc

SEQ ID NO: 781 - DNA, 20 bp, Artificial Sequence
  Antisense Oligonucleotide
ttataattaattaattaacc

SEQ ID NO: 782 - DNA, 19 bp, Artificial Sequence
  Antisense Oligonucleotide
ataacaccaatatattatt

SEQ ID NO: 783 - DNA, 20 bp, Artificial Sequence
  Antisense Oligonucleotide
tataacaccaatatattatt

SEQ ID NO: 784 - DNA, 20 bp, Artificial Sequence
  Antisense Oligonucleotide
ctataacaccaatatattat

SEQ ID NO: 785 - DNA, 18 bp, Artificial Sequence
  Antisense Oligonucleotide
tataacaccaatatatta

SEQ ID NO: 786 - DNA, 19 bp, Artificial Sequence
  Antisense Oligonucleotide
ctataacaccaatatatta

SEQ ID NO: 787 - DNA, 20 bp, Artificial Sequence
  Antisense Oligonucleotide
tctataacaccaatatatta

SEQ ID NO: 788 - DNA, 18 bp, Artificial Sequence
  Antisense Oligonucleotide
ctataacaccaatatatt

SEQ ID NO: 789 - DNA, 19 bp, Artificial Sequence
  Antisense Oligonucleotide
tctataacaccaatatatt

SEQ ID NO: 790 - DNA, 17 bp, Artificial Sequence
  Antisense Oligonucleotide
ctataacaccaatatat

SEQ ID NO: 791 - DNA, 18 bp, Artificial Sequence
  Antisense Oligonucleotide
tctataacaccaatatat

SEQ ID NO: 792 - DNA, 19 bp, Artificial Sequence
  Antisense Oligonucleotide
gtctataacaccaatatat

SEQ ID NO: 793 - DNA, 18 bp, Artificial Sequence
  Antisense Oligonucleotide
gtctataacaccaatata

SEQ ID NO: 794 - DNA, 17 bp, Artificial Sequence
  Antisense Oligonucleotide
gtctataacaccaatat

SEQ ID NO: 795 - DNA, 18 bp, Artificial Sequence
  Antisense Oligonucleotide
tgtctataacaccaatat

SEQ ID NO: 796 - DNA, 17 bp, Artificial Sequence
  Antisense Oligonucleotide
ttgtctataacaccaat

SEQ ID NO: 797 - DNA, 17 bp, Artificial Sequence
  Antisense Oligonucleotide
ttattgtctataacacc

SEQ ID NO: 798 - DNA, 19 bp, Artificial Sequence
  Antisense Oligonucleotide
cacaacacatatataaccc

SEQ ID NO: 799 - DNA, 20 bp, Artificial Sequence
  Antisense Oligonucleotide
ccacaacacatatataaccc

SEQ ID NO: 800 - DNA, 19 bp, Artificial Sequence
  Antisense Oligonucleotide
ccacaacacatatataacc

SEQ ID NO: 801 - DNA, 20 bp, Artificial Sequence
  Antisense Oligonucleotide
cccacaacacatatataacc

SEQ ID NO: 802 - DNA, 20 bp, Artificial Sequence
  Antisense Oligonucleotide
tcccacaacacatatataac

SEQ ID NO: 803 - DNA, 18 bp, Artificial Sequence
  Antisense Oligonucleotide
ccacaacacatatataac

SEQ ID NO: 804 - DNA, 19 bp, Artificial Sequence
  Antisense Oligonucleotide
cccacaacacatatataac

SEQ ID NO: 805 - DNA, 19 bp, Artificial Sequence
  Antisense Oligonucleotide
tcccacaacacatatataa

SEQ ID NO: 806 - DNA, 20 bp, Artificial Sequence
  Antisense Oligonucleotide
gtcccacaacacatatataa

SEQ ID NO: 807 - DNA, 18 bp, Artificial Sequence
  Antisense Oligonucleotide
tcccacaacacatatata

SEQ ID NO: 808 - DNA, 19 bp, Artificial Sequence
  Antisense Oligonucleotide
gtcccacaacacatatata

SEQ ID NO: 809 - DNA, 16 bp, Artificial Sequence
  Antisense Oligonucleotide
gatcgattaagtggag

SEQ ID NO: 810 - DNA, 16 bp, Artificial Sequence
  Antisense Oligonucleotide
agatcgattaagtgga

SEQ ID NO: 811 - DNA, 19 bp, Artificial Sequence
  Antisense Oligonucleotide
aattttttctaaacccaaa

SEQ ID NO: 812 - DNA, 20 bp, Artificial Sequence
  Antisense Oligonucleotide
caattttttctaaacccaaa

SEQ ID NO: 813 - DNA, 19 bp, Artificial Sequence
  Antisense Oligonucleotide
caattttttctaaacccaa

SEQ ID NO: 814 - DNA, 19 bp, Artificial Sequence
  Antisense Oligonucleotide
gcaattttttctaaaccca

SEQ ID NO: 815 - DNA, 18 bp, Artificial Sequence
  Antisense Oligonucleotide
gcaattttttctaaaccc

SEQ ID NO: 816 - DNA, 18 bp, Artificial Sequence
  Antisense Oligonucleotide
tgcaattttttctaaacc

SEQ ID NO: 817 - DNA, 18 bp, Artificial Sequence
  Antisense Oligonucleotide
tctattctcacatttata

SEQ ID NO: 818 - DNA, 20 bp, Artificial Sequence
  Antisense Oligonucleotide
tctctattctcacatttata

SEQ ID NO: 819 - DNA, 20 bp, Artificial Sequence
  Antisense Oligonucleotide
ttctctattctcacatttat

SEQ ID NO: 820 - DNA, 19 bp, Artificial Sequence
  Antisense Oligonucleotide
tctctattctcacatttat

SEQ ID NO: 821 - DNA, 18 bp, Artificial Sequence
  Antisense Oligonucleotide
ttctctattctcacattt

SEQ ID NO: 822 - DNA, 20 bp, Artificial Sequence
  Antisense Oligonucleotide
tttttctctattctcacatt

SEQ ID NO: 823 - DNA, 18 bp, Artificial Sequence
  Antisense Oligonucleotide
tttctctattctcacatt

SEQ ID NO: 824 - DNA, 20 bp, Artificial Sequence
  Antisense Oligonucleotide
ttttttctctattctcacat

SEQ ID NO: 825 - DNA, 20 bp, Artificial Sequence
  Antisense Oligonucleotide
aacttttttctctattctca

SEQ ID NO: 826 - DNA, 20 bp, Artificial Sequence
  Antisense Oligonucleotide
taacttttttctctattctc

SEQ ID NO: 827 - DNA, 19 bp, Artificial Sequence
  Antisense Oligonucleotide
ttaacttttttctctattc

SEQ ID NO: 828 - DNA, 18 bp, Artificial Sequence
  Antisense Oligonucleotide
gttaacttttttctctat

SEQ ID NO: 829 - DNA, 18 bp, Artificial Sequence
  Antisense Oligonucleotide
ttagtcattcttcacacc

SEQ ID NO: 830 - DNA, 20 bp, Artificial Sequence
  Antisense Oligonucleotide
ccattcaatccttaaaaaca

SEQ ID NO: 831 - DNA, 19 bp, Artificial Sequence
  Antisense Oligonucleotide
ccattcaatccttaaaaac

SEQ ID NO: 832 - DNA, 20 bp, Artificial Sequence
  Antisense Oligonucleotide
tccattcaatccttaaaaac

SEQ ID NO: 833 - DNA, 19 bp, Artificial Sequence
  Antisense Oligonucleotide
ttccattcaatccttaaaa

SEQ ID NO: 834 - DNA, 20 bp, Artificial Sequence
  Antisense Oligonucleotide
tttccattcaatccttaaaa

SEQ ID NO: 835 - DNA, 19 bp, Artificial Sequence
  Antisense Oligonucleotide
tttccattcaatccttaaa

SEQ ID NO: 836 - DNA, 18 bp, Artificial Sequence
  Antisense Oligonucleotide
cataaaattttcaactta

SEQ ID NO: 837 - DNA, 18 bp, Artificial Sequence
  Antisense Oligonucleotide
tcataaaattttcaactt

SEQ ID NO: 838 - DNA, 18 bp, Artificial Sequence
  Antisense Oligonucleotide
atcataaaattttcaact

SEQ ID NO: 839 - DNA, 18 bp, Artificial Sequence
  Antisense Oligonucleotide
ttgtcttttaacattcca

SEQ ID NO: 840 - DNA, 20 bp, Artificial Sequence
  Antisense Oligonucleotide
cactttcttttactatctct

SEQ ID NO: 841 - DNA, 20 bp, Artificial Sequence
  Antisense Oligonucleotide
atcactttcttttactatct

SEQ ID NO: 842 - DNA, 18 bp, Artificial Sequence
  Antisense Oligonucleotide
tcactttcttttactatc

SEQ ID NO: 843 - DNA, 19 bp, Artificial Sequence
  Antisense Oligonucleotide
atcactttcttttactatc

SEQ ID NO: 844 - DNA, 20 bp, Artificial Sequence
  Antisense Oligonucleotide
tatcactttcttttactatc

SEQ ID NO: 845 - DNA, 18 bp, Artificial Sequence
  Antisense Oligonucleotide
atcactttcttttactat

SEQ ID NO: 846 - DNA, 19 bp, Artificial Sequence
  Antisense Oligonucleotide
tatcactttcttttactat

SEQ ID NO: 847 - DNA, 20 bp, Artificial Sequence
  Antisense Oligonucleotide
tctcttatataatttattat

SEQ ID NO: 848 - DNA, 18 bp, Artificial Sequence
  Antisense Oligonucleotide
ctcttatataatttatta

SEQ ID NO: 849 - DNA, 18 bp, Artificial Sequence
  Antisense Oligonucleotide
tacttctcttatataatt

SEQ ID NO: 850 - DNA, 18 bp, Artificial Sequence
  Antisense Oligonucleotide
ctacttctcttatataat

SEQ ID NO: 851 - DNA, 17 bp, Artificial Sequence
  Antisense Oligonucleotide
actacttgcaccctaca

SEQ ID NO: 852 - DNA, 18 bp, Artificial Sequence
  Antisense Oligonucleotide
cacccacatatactactt

SEQ ID NO: 853 - DNA, 17 bp, Artificial Sequence
  Antisense Oligonucleotide
ctccttattcatcacat

SEQ ID NO: 854 - DNA, 18 bp, Artificial Sequence
  Antisense Oligonucleotide
tctccttattcatcacat

SEQ ID NO: 855 - DNA, 19 bp, Artificial Sequence
  Antisense Oligonucleotide
ttctccttattcatcacat

SEQ ID NO: 856 - DNA, 20 bp, Artificial Sequence
  Antisense Oligonucleotide
tttctccttattcatcacat

SEQ ID NO: 857 - DNA, 19 bp, Artificial Sequence
  Antisense Oligonucleotide
tttctccttattcatcaca

SEQ ID NO: 858 - DNA, 19 bp, Artificial Sequence
  Antisense Oligonucleotide
aattattttactttcatct

SEQ ID NO: 859 - DNA, 18 bp, Artificial Sequence
  Antisense Oligonucleotide
tgctaattatcatttcct

SEQ ID NO: 860 - DNA, 20 bp, Artificial Sequence
  Antisense Oligonucleotide
ttatattaactctaataatc

SEQ ID NO: 861 - DNA, 18 bp, Artificial Sequence
  Antisense Oligonucleotide
gccactttttcttaactc

SEQ ID NO: 862 - DNA, 18 bp, Artificial Sequence
  Antisense Oligonucleotide
cataccaaaaactaatac

SEQ ID NO: 863 - DNA, 19 bp, Artificial Sequence
  Antisense Oligonucleotide
acataccaaaaactaatac

SEQ ID NO: 864 - DNA, 19 bp, Artificial Sequence
  Antisense Oligonucleotide
acttatcaacacttaaact

SEQ ID NO: 865 - DNA, 20 bp, Artificial Sequence
  Antisense Oligonucleotide
cacttatcaacacttaaact

SEQ ID NO: 866 - DNA, 19 bp, Artificial Sequence
  Antisense Oligonucleotide
cacttatcaacacttaaac

SEQ ID NO: 867 - DNA, 20 bp, Artificial Sequence
  Antisense Oligonucleotide
acacttatcaacacttaaac

SEQ ID NO: 868 - DNA, 18 bp, Artificial Sequence
  Antisense Oligonucleotide
cacttatcaacacttaaa

SEQ ID NO: 869 - DNA, 19 bp, Artificial Sequence
  Antisense Oligonucleotide
acacttatcaacacttaaa

SEQ ID NO: 870 - DNA, 20 bp, Artificial Sequence
  Antisense Oligonucleotide
cacacttatcaacacttaaa

SEQ ID NO: 871 - DNA, 18 bp, Artificial Sequence
  Antisense Oligonucleotide
acacttatcaacacttaa

SEQ ID NO: 872 - DNA, 19 bp, Artificial Sequence
  Antisense Oligonucleotide
cacacttatcaacacttaa

SEQ ID NO: 873 - DNA, 17 bp, Artificial Sequence
  Antisense Oligonucleotide
acacttatcaacactta

SEQ ID NO: 874 - DNA, 18 bp, Artificial Sequence
  Antisense Oligonucleotide
cacacttatcaacactta

SEQ ID NO: 875 - DNA, 17 bp, Artificial Sequence
  Antisense Oligonucleotide
cacacttatcaacactt

SEQ ID NO: 876 - DNA, 19 bp, Artificial Sequence
  Antisense Oligonucleotide
ctatatttccaccaacaat

SEQ ID NO: 877 - DNA, 20 bp, Artificial Sequence
  Antisense Oligonucleotide
tctatatttccaccaacaat

SEQ ID NO: 878 - DNA, 19 bp, Artificial Sequence
  Antisense Oligonucleotide
tctatatttccaccaacaa

SEQ ID NO: 879 - DNA, 20 bp, Artificial Sequence
  Antisense Oligonucleotide
atctatatttccaccaacaa

SEQ ID NO: 880 - DNA, 20 bp, Artificial Sequence
  Antisense Oligonucleotide
tttattctaactttatattt

SEQ ID NO: 881 - DNA, 19 bp, Artificial Sequence
  Antisense Oligonucleotide
attcactctattttcacaa

SEQ ID NO: 882 - DNA, 20 bp, Artificial Sequence
  Antisense Oligonucleotide
taattcactctattttcaca

SEQ ID NO: 883 - DNA, 19 bp, Artificial Sequence
  Antisense Oligonucleotide
taattcactctattttcac

SEQ ID NO: 884 - DNA, 20 bp, Artificial Sequence
  Antisense Oligonucleotide
ataattcactctattttcac

SEQ ID NO: 885 - DNA, 18 bp, Artificial Sequence
  Antisense Oligonucleotide
taattcactctattttca

SEQ ID NO: 886 - DNA, 19 bp, Artificial Sequence
  Antisense Oligonucleotide
ataattcactctattttca

SEQ ID NO: 887 - DNA, 20 bp, Artificial Sequence
  Antisense Oligonucleotide
tataattcactctattttca

SEQ ID NO: 888 - DNA, 19 bp, Artificial Sequence
  Antisense Oligonucleotide
tataattcactctattttc

SEQ ID NO: 889 - DNA, 20 bp, Artificial Sequence
  Antisense Oligonucleotide
ttataattcactctattttc

SEQ ID NO: 890 - DNA, 19 bp, Artificial Sequence
  Antisense Oligonucleotide
ttataattcactctatttt

SEQ ID NO: 891 - DNA, 20 bp, Artificial Sequence
  Antisense Oligonucleotide
attataattcactctatttt

SEQ ID NO: 892 - DNA, 18 bp, Artificial Sequence
  Antisense Oligonucleotide
ttataattcactctattt

SEQ ID NO: 893 - DNA, 19 bp, Artificial Sequence
  Antisense Oligonucleotide
attataattcactctattt

SEQ ID NO: 894 - DNA, 20 bp, Artificial Sequence
  Antisense Oligonucleotide
tattataattcactctattt

SEQ ID NO: 895 - DNA, 18 bp, Artificial Sequence
  Antisense Oligonucleotide
attataattcactctatt

SEQ ID NO: 896 - DNA, 19 bp, Artificial Sequence
  Antisense Oligonucleotide
tattataattcactctatt

SEQ ID NO: 897 - DNA, 20 bp, Artificial Sequence
  Antisense Oligonucleotide
ttattataattcactctatt

SEQ ID NO: 898 - DNA, 18 bp, Artificial Sequence
  Antisense Oligonucleotide
tattataattcactctat

SEQ ID NO: 899 - DNA, 19 bp, Artificial Sequence
  Antisense Oligonucleotide
ttattataattcactctat

SEQ ID NO: 900 - DNA, 20 bp, Artificial Sequence
  Antisense Oligonucleotide
attattataattcactctat

SEQ ID NO: 901 - DNA, 18 bp, Artificial Sequence
  Antisense Oligonucleotide
ttattataattcactcta

SEQ ID NO: 902 - DNA, 19 bp, Artificial Sequence
  Antisense Oligonucleotide
attattataattcactcta

SEQ ID NO: 903 - DNA, 20 bp, Artificial Sequence
  Antisense Oligonucleotide
aattattataattcactcta

SEQ ID NO: 904 - DNA, 20 bp, Artificial Sequence
  Antisense Oligonucleotide
aaattattataattcactct

SEQ ID NO: 905 - DNA, 19 bp, Artificial Sequence
  Antisense Oligonucleotide
ataacattaacttacattt

SEQ ID NO: 906 - DNA, 20 bp, Artificial Sequence
  Antisense Oligonucleotide
aataacattaacttacattt

SEQ ID NO: 907 - DNA, 19 bp, Artificial Sequence
  Antisense Oligonucleotide
aataacattaacttacatt

SEQ ID NO: 908 - DNA, 20 bp, Artificial Sequence
  Antisense Oligonucleotide
taataacattaacttacatt

SEQ ID NO: 909 - DNA, 19 bp, Artificial Sequence
  Antisense Oligonucleotide
taataacattaacttacat

SEQ ID NO: 910 - DNA, 20 bp, Artificial Sequence
  Antisense Oligonucleotide
ctaataacattaacttacat

SEQ ID NO: 911 - DNA, 19 bp, Artificial Sequence
  Antisense Oligonucleotide
ctaataacattaacttaca

SEQ ID NO: 912 - DNA, 20 bp, Artificial Sequence
  Antisense Oligonucleotide
tctaataacattaacttaca

SEQ ID NO: 913 - DNA, 18 bp, Artificial Sequence
  Antisense Oligonucleotide
ctaataacattaacttac

SEQ ID NO: 914 - DNA, 19 bp, Artificial Sequence
  Antisense Oligonucleotide
tctaataacattaacttac

SEQ ID NO: 915 - DNA, 20 bp, Artificial Sequence
  Antisense Oligonucleotide
ttctaataacattaacttac

SEQ ID NO: 916 - DNA, 19 bp, Artificial Sequence
  Antisense Oligonucleotide
ttctaataacattaactta

SEQ ID NO: 917 - DNA, 20 bp, Artificial Sequence
  Antisense Oligonucleotide
tttctaataacattaactta

SEQ ID NO: 918 - DNA, 18 bp, Artificial Sequence
  Antisense Oligonucleotide
tctaataacattaactta

SEQ ID NO: 919 - DNA, 19 bp, Artificial Sequence
  Antisense Oligonucleotide
cttttctaataacattaac

SEQ ID NO: 920 - DNA, 20 bp, Artificial Sequence
  Antisense Oligonucleotide
tcttttctaataacattaac

SEQ ID NO: 921 - DNA, 19 bp, Artificial Sequence
  Antisense Oligonucleotide
tcttttctaataacattaa

SEQ ID NO: 922 - DNA, 20 bp, Artificial Sequence
  Antisense Oligonucleotide
ttcttttctaataacattaa

SEQ ID NO: 923 - DNA, 19 bp, Artificial Sequence
  Antisense Oligonucleotide
tttcttttctaataacatt

SEQ ID NO: 924 - DNA, 19 bp, Artificial Sequence
  Antisense Oligonucleotide
ctttcaccttaaactccaa

SEQ ID NO: 925 - DNA, 19 bp, Artificial Sequence
  Antisense Oligonucleotide
ctaaatccatacaatttct

SEQ ID NO: 926 - DNA, 20 bp, Artificial Sequence
  Antisense Oligonucleotide
actaaatccatacaatttct

SEQ ID NO: 927 - DNA, 18 bp, Artificial Sequence
  Antisense Oligonucleotide
ctaaatccatacaatttc

SEQ ID NO: 928 - DNA, 19 bp, Artificial Sequence
  Antisense Oligonucleotide
actaaatccatacaatttc

SEQ ID NO: 929 - DNA, 20 bp, Artificial Sequence
  Antisense Oligonucleotide
cactaaatccatacaatttc

SEQ ID NO: 930 - DNA, 18 bp, Artificial Sequence
  Antisense Oligonucleotide
actaaatccatacaattt

SEQ ID NO: 931 - DNA, 19 bp, Artificial Sequence
  Antisense Oligonucleotide
cactaaatccatacaattt

SEQ ID NO: 932 - DNA, 20 bp, Artificial Sequence
  Antisense Oligonucleotide
acactaaatccatacaattt

SEQ ID NO: 933 - DNA, 20 bp, Artificial Sequence
  Antisense Oligonucleotide
tacactaaatccatacaatt

SEQ ID NO: 934 - DNA, 18 bp, Artificial Sequence
  Antisense Oligonucleotide
cactaaatccatacaatt

SEQ ID NO: 935 - DNA, 19 bp, Artificial Sequence
  Antisense Oligonucleotide
acactaaatccatacaatt

SEQ ID NO: 936 - DNA, 19 bp, Artificial Sequence
  Antisense Oligonucleotide
tacactaaatccatacaat

SEQ ID NO: 937 - DNA, 20 bp, Artificial Sequence
  Antisense Oligonucleotide
ttacactaaatccatacaat

SEQ ID NO: 938 - DNA, 18 bp, Artificial Sequence
  Antisense Oligonucleotide
acactaaatccatacaat

SEQ ID NO: 939 - DNA, 18 bp, Artificial Sequence
  Antisense Oligonucleotide
tacactaaatccatacaa

SEQ ID NO: 940 - DNA, 19 bp, Artificial Sequence
  Antisense Oligonucleotide
ttacactaaatccatacaa

SEQ ID NO: 941 - DNA, 20 bp, Artificial Sequence
  Antisense Oligonucleotide
cttacactaaatccatacaa

SEQ ID NO: 942 - DNA, 18 bp, Artificial Sequence
  Antisense Oligonucleotide
ttacactaaatccataca

SEQ ID NO: 943 - DNA, 19 bp, Artificial Sequence
  Antisense Oligonucleotide
cttacactaaatccataca

SEQ ID NO: 944 - DNA, 20 bp, Artificial Sequence
  Antisense Oligonucleotide
acttacactaaatccataca

SEQ ID NO: 945 - DNA, 17 bp, Artificial Sequence
  Antisense Oligonucleotide
ttacactaaatccatac

SEQ ID NO: 946 - DNA, 17 bp, Artificial Sequence
  Antisense Oligonucleotide
cttacactaaatccata

SEQ ID NO: 947 - DNA, 18 bp, Artificial Sequence
  Antisense Oligonucleotide
acttacactaaatccata

SEQ ID NO: 948 - DNA, 17 bp, Artificial Sequence
  Antisense Oligonucleotide
acttacactaaatccat

SEQ ID NO: 949 - DNA, 18 bp, Artificial Sequence
  Antisense Oligonucleotide
gccaaataatttttaacc

SEQ ID NO: 950 - DNA, 19 bp, Artificial Sequence
  Antisense Oligonucleotide
gtaatcaccttaaaaatta

SEQ ID NO: 951 - DNA, 19 bp, Artificial Sequence
  Antisense Oligonucleotide
actattcacaaaaatattt

SEQ ID NO: 952 - DNA, 20 bp, Artificial Sequence
  Antisense Oligonucleotide
tactattcacaaaaatattt

SEQ ID NO: 953 - DNA, 19 bp, Artificial Sequence
  Antisense Oligonucleotide
tactattcacaaaaatatt

SEQ ID NO: 954 - DNA, 20 bp, Artificial Sequence
  Antisense Oligonucleotide
ctactattcacaaaaatatt

SEQ ID NO: 955 - DNA, 19 bp, Artificial Sequence
  Antisense Oligonucleotide
ctactattcacaaaaatat

SEQ ID NO: 956 - DNA, 20 bp, Artificial Sequence
  Antisense Oligonucleotide
tctactattcacaaaaatat

SEQ ID NO: 957 - DNA, 18 bp, Artificial Sequence
  Antisense Oligonucleotide
ctactattcacaaaaata

SEQ ID NO: 958 - DNA, 19 bp, Artificial Sequence
  Antisense Oligonucleotide
tctactattcacaaaaata

SEQ ID NO: 959 - DNA, 20 bp, Artificial Sequence
  Antisense Oligonucleotide
ttctactattcacaaaaata

SEQ ID NO: 960 - DNA, 18 bp, Artificial Sequence
  Antisense Oligonucleotide
tctactattcacaaaaat

SEQ ID NO: 961 - DNA, 19 bp, Artificial Sequence
  Antisense Oligonucleotide
ttctactattcacaaaaat

SEQ ID NO: 962 - DNA, 19 bp, Artificial Sequence
  Antisense Oligonucleotide
ctataaacatatctataaa

SEQ ID NO: 963 - DNA, 20 bp, Artificial Sequence
  Antisense Oligonucleotide
actataaacatatctataaa

SEQ ID NO: 964 - DNA, 19 bp, Artificial Sequence
  Antisense Oligonucleotide
actataaacatatctataa

SEQ ID NO: 965 - DNA, 20 bp, Artificial Sequence
  Antisense Oligonucleotide
aactataaacatatctataa

SEQ ID NO: 966 - DNA, 20 bp, Artificial Sequence
  Antisense Oligonucleotide
taactataaacatatctata

SEQ ID NO: 967 - DNA, 19 bp, Artificial Sequence
  Antisense Oligonucleotide
taactataaacatatctat

SEQ ID NO: 968 - DNA, 18 bp, Artificial Sequence
  Antisense Oligonucleotide
taactataaacatatcta

SEQ ID NO: 969 - DNA, 16 bp, Artificial Sequence
  Antisense Oligonucleotide
ggatgagaatgtatgg

SEQ ID NO: 970 - DNA, 18 bp, Artificial Sequence
  Antisense Oligonucleotide
tattcttctaacaaaatc

SEQ ID NO: 971 - DNA, 19 bp, Artificial Sequence
  Antisense Oligonucleotide
atattcttctaacaaaatc

SEQ ID NO: 972 - DNA, 20 bp, Artificial Sequence
  Antisense Oligonucleotide
aatattcttctaacaaaatc

SEQ ID NO: 973 - DNA, 18 bp, Artificial Sequence
  Antisense Oligonucleotide
tgaatattcttctaacaa

SEQ ID NO: 974 - DNA, 18 bp, Artificial Sequence
  Antisense Oligonucleotide
ttgaatattcttctaaca

SEQ ID NO: 975 - DNA, 18 bp, Artificial Sequence
  Antisense Oligonucleotide
tattgaatattcttctaa

SEQ ID NO: 976 - DNA, 18 bp, Artificial Sequence
  Antisense Oligonucleotide
tgacattaataatttctt

SEQ ID NO: 977 - DNA, 18 bp, Artificial Sequence
  Antisense Oligonucleotide
gtacatattcttattcaa

SEQ ID NO: 978 - DNA, 20 bp, Artificial Sequence
  Antisense Oligonucleotide
ttacatcttttttaaacaat

SEQ ID NO: 979 - DNA, 19 bp, Artificial Sequence
  Antisense Oligonucleotide
ttacatcttttttaaacaa

SEQ ID NO: 980 - DNA, 19 bp, Artificial Sequence
  Antisense Oligonucleotide
attcttatcattctccatt

SEQ ID NO: 981 - DNA, 20 bp, Artificial Sequence
  Antisense Oligonucleotide
tattcttatcattctccatt

SEQ ID NO: 982 - DNA, 18 bp, Artificial Sequence
  Antisense Oligonucleotide
attcttatcattctccat

SEQ ID NO: 983 - DNA, 19 bp, Artificial Sequence
  Antisense Oligonucleotide
tattcttatcattctccat

SEQ ID NO: 984 - DNA, 18 bp, Artificial Sequence
  Antisense Oligonucleotide
gtaataaaaatccaccat

SEQ ID NO: 985 - DNA, 18 bp, Artificial Sequence
  Antisense Oligonucleotide
tgtaataaaaatccacca

SEQ ID NO: 986 - DNA, 18 bp, Artificial Sequence
  Antisense Oligonucleotide
atcactatcttcaatcat

SEQ ID NO: 987 - DNA, 20 bp, Artificial Sequence
  Antisense Oligonucleotide
acttttttctaataccaaca

SEQ ID NO: 988 - DNA, 18 bp, Artificial Sequence
  Antisense Oligonucleotide
cttttttctaataccaac

SEQ ID NO: 989 - DNA, 19 bp, Artificial Sequence
  Antisense Oligonucleotide
acttttttctaataccaac

SEQ ID NO: 990 - DNA, 20 bp, Artificial Sequence
  Antisense Oligonucleotide
cacttttttctaataccaac

SEQ ID NO: 991 - DNA, 18 bp, Artificial Sequence
  Antisense Oligonucleotide
acttttttctaataccaa

SEQ ID NO: 992 - DNA, 19 bp, Artificial Sequence
  Antisense Oligonucleotide
cacttttttctaataccaa

SEQ ID NO: 993 - DNA, 20 bp, Artificial Sequence
  Antisense Oligonucleotide
tcacttttttctaataccaa

SEQ ID NO: 994 - DNA, 18 bp, Artificial Sequence
  Antisense Oligonucleotide
cacttttttctaatacca

SEQ ID NO: 995 - DNA, 19 bp, Artificial Sequence
  Antisense Oligonucleotide
tcacttttttctaatacca

SEQ ID NO: 996 - DNA, 20 bp, Artificial Sequence
  Antisense Oligonucleotide
tttcacttttttctaatacc

SEQ ID NO: 997 - DNA, 19 bp, Artificial Sequence
  Antisense Oligonucleotide
tttcacttttttctaatac

SEQ ID NO: 998 - DNA, 20 bp, Artificial Sequence
  Antisense Oligonucleotide
attttcacttttttctaata

SEQ ID NO: 999 - DNA, 20 bp, Artificial Sequence
  Antisense Oligonucleotide
aaattttcacttttttctaa

SEQ ID NO: 1000 - DNA, 19 bp, Artificial Sequence
  Antisense Oligonucleotide
aaattttcacttttttcta

SEQ ID NO: 1001 - DNA, 20 bp, Artificial Sequence
  Antisense Oligonucleotide
aaaattttcacttttttcta

SEQ ID NO: 1002 - DNA, 18 bp, Artificial Sequence
  Antisense Oligonucleotide
ttatacaaaccttactat

SEQ ID NO: 1003 - DNA, 19 bp, Artificial Sequence
  Antisense Oligonucleotide
tttatacaaaccttactat

SEQ ID NO: 1004 - DNA, 18 bp, Artificial Sequence
  Antisense Oligonucleotide
atgtttatacaaacctta

SEQ ID NO: 1005 - DNA, 20 bp, Artificial Sequence
  Antisense Oligonucleotide
cattcaacctttaacatccc

SEQ ID NO: 1006 - DNA, 19 bp, Artificial Sequence
  Antisense Oligonucleotide
cattcaacctttaacatcc

SEQ ID NO: 1007 - DNA, 20 bp, Artificial Sequence
  Antisense Oligonucleotide
acattcaacctttaacatcc

SEQ ID NO: 1008 - DNA, 19 bp, Artificial Sequence
  Antisense Oligonucleotide
acattcaacctttaacatc

SEQ ID NO: 1009 - DNA, 19 bp, Artificial Sequence
  Antisense Oligonucleotide
gacattcaacctttaacat

SEQ ID NO: 1010 - DNA, 19 bp, Artificial Sequence
  Antisense Oligonucleotide
agacattcaacctttaaca

SEQ ID NO: 1011 - DNA, 18 bp, Artificial Sequence
  Antisense Oligonucleotide
agacattcaacctttaac

SEQ ID NO: 1012 - DNA, 18 bp, Artificial Sequence
  Antisense Oligonucleotide
aaagacattcaaccttta

SEQ ID NO: 1013 - DNA, 18 bp, Artificial Sequence
  Antisense Oligonucleotide
caaagacattcaaccttt

SEQ ID NO: 1014 - DNA, 17 bp, Artificial Sequence
  Antisense Oligonucleotide
ccaaagacattcaacct

SEQ ID NO: 1015 - DNA, 17 bp, Artificial Sequence
  Antisense Oligonucleotide
accaaagacattcaacc

SEQ ID NO: 1016 - DNA, 20 bp, Artificial Sequence
  Antisense Oligonucleotide
taaactctccaacatttaaa

SEQ ID NO: 1017 - DNA, 20 bp, Artificial Sequence
  Antisense Oligonucleotide
tataaactctccaacattta

SEQ ID NO: 1018 - DNA, 20 bp, Artificial Sequence
  Antisense Oligonucleotide
atataaactctccaacattt

SEQ ID NO: 1019 - DNA, 18 bp, Artificial Sequence
  Antisense Oligonucleotide
tataaactctccaacatt

SEQ ID NO: 1020 - DNA, 19 bp, Artificial Sequence
  Antisense Oligonucleotide
atataaactctccaacatt

SEQ ID NO: 1021 - DNA, 20 bp, Artificial Sequence
  Antisense Oligonucleotide
aatataaactctccaacatt

SEQ ID NO: 1022 - DNA, 17 bp, Artificial Sequence
  Antisense Oligonucleotide
tataaactctccaacat

SEQ ID NO: 1023 - DNA, 18 bp, Artificial Sequence
  Antisense Oligonucleotide
atataaactctccaacat

SEQ ID NO: 1024 - DNA, 19 bp, Artificial Sequence
  Antisense Oligonucleotide
aatataaactctccaacat

SEQ ID NO: 1025 - DNA, 20 bp, Artificial Sequence
  Antisense Oligonucleotide
aaatataaactctccaacat

SEQ ID NO: 1026 - DNA, 18 bp, Artificial Sequence
  Antisense Oligonucleotide
aatataaactctccaaca

SEQ ID NO: 1027 - DNA, 20 bp, Artificial Sequence
  Antisense Oligonucleotide
taaaatataaactctccaac

SEQ ID NO: 1028 - DNA, 19 bp, Artificial Sequence
  Antisense Oligonucleotide
taaaatataaactctccaa

SEQ ID NO: 1029 - DNA, 20 bp, Artificial Sequence
  Antisense Oligonucleotide
atttcatattattcattaaa

SEQ ID NO: 1030 - DNA, 20 bp, Artificial Sequence
  Antisense Oligonucleotide
aatttcatattattcattaa

SEQ ID NO: 1031 - DNA, 19 bp, Artificial Sequence
  Antisense Oligonucleotide
atttcatattattcattaa

SEQ ID NO: 1032 - DNA, 19 bp, Artificial Sequence
  Antisense Oligonucleotide
aatttcatattattcatta

SEQ ID NO: 1033 - DNA, 20 bp, Artificial Sequence
  Antisense Oligonucleotide
aaatttcatattattcatta

SEQ ID NO: 1034 - DNA, 20 bp, Artificial Sequence
  Antisense Oligonucleotide
taaatttcatattattcatt

SEQ ID NO: 1035 - DNA, 19 bp, Artificial Sequence
  Antisense Oligonucleotide
taaatttcatattattcat

SEQ ID NO: 1036 - DNA, 20 bp, Artificial Sequence
  Antisense Oligonucleotide
ctaaatttcatattattcat

SEQ ID NO: 1037 - DNA, 19 bp, Artificial Sequence
  Antisense Oligonucleotide
ctaaatttcatattattca

SEQ ID NO: 1038 - DNA, 18 bp, Artificial Sequence
  Antisense Oligonucleotide
ctaaatttcatattattc

SEQ ID NO: 1039 - DNA, 18 bp, Artificial Sequence
  Antisense Oligonucleotide
tttacataccattcattc

SEQ ID NO: 1040 - DNA, 19 bp, Artificial Sequence
  Antisense Oligonucleotide
atttacataccattcattc

SEQ ID NO: 1041 - DNA, 20 bp, Artificial Sequence
  Antisense Oligonucleotide
tatttacataccattcattc

SEQ ID NO: 1042 - DNA, 18 bp, Artificial Sequence
  Antisense Oligonucleotide
atttacataccattcatt

SEQ ID NO: 1043 - DNA, 19 bp, Artificial Sequence
  Antisense Oligonucleotide
tatttacataccattcatt

SEQ ID NO: 1044 - DNA, 18 bp, Artificial Sequence
  Antisense Oligonucleotide
tatttacataccattcat

SEQ ID NO: 1045 - DNA, 19 bp, Artificial Sequence
  Antisense Oligonucleotide
gtatttacataccattcat

SEQ ID NO: 1046 - DNA, 18 bp, Artificial Sequence
  Antisense Oligonucleotide
gtatttacataccattca

SEQ ID NO: 1047 - DNA, 17 bp, Artificial Sequence
  Antisense Oligonucleotide
gtatttacataccattc

SEQ ID NO: 1048 - DNA, 18 bp, Artificial Sequence
  Antisense Oligonucleotide
tgtatttacataccattc

SEQ ID NO: 1049 - DNA, 18 bp, Artificial Sequence
  Antisense Oligonucleotide
ctgtatttacataccatt

SEQ ID NO: 1050 - DNA, 18 bp, Artificial Sequence
  Antisense Oligonucleotide
tgtaaatacaatctatca

SEQ ID NO: 1051 - DNA, 18 bp, Artificial Sequence
  Antisense Oligonucleotide
atgtaaatacaatctatc

SEQ ID NO: 1052 - DNA, 19 bp, Artificial Sequence
  Antisense Oligonucleotide
gcattcatataaatcttca

SEQ ID NO: 1053 - DNA, 18 bp, Artificial Sequence
  Antisense Oligonucleotide
gcattcatataaatcttc

SEQ ID NO: 1054 - DNA, 18 bp, Artificial Sequence
  Antisense Oligonucleotide
taagcattcatataaatc

SEQ ID NO: 1055 - DNA, 18 bp, Artificial Sequence
  Antisense Oligonucleotide
caatgaattctaaccaaa

SEQ ID NO: 1056 - DNA, 18 bp, Artificial Sequence
  Antisense Oligonucleotide
gtcatctttacataaaaa

SEQ ID NO: 1057 - DNA, 18 bp, Artificial Sequence
  Antisense Oligonucleotide
gtcacttattcttcaaat

SEQ ID NO: 1058 - DNA, 19 bp, Artificial Sequence
  Antisense Oligonucleotide
atattatactttcatttaa

SEQ ID NO: 1059 - DNA, 20 bp, Artificial Sequence
  Antisense Oligonucleotide
aatattatactttcatttaa

SEQ ID NO: 1060 - DNA, 20 bp, Artificial Sequence
  Antisense Oligonucleotide
taatattatactttcattta

SEQ ID NO: 1061 - DNA, 19 bp, Artificial Sequence
  Antisense Oligonucleotide
taatattatactttcattt

SEQ ID NO: 1062 - DNA, 20 bp, Artificial Sequence
  Antisense Oligonucleotide
ttaatattatactttcattt

SEQ ID NO: 1063 - DNA, 18 bp, Artificial Sequence
  Antisense Oligonucleotide
gttaatattatactttca

SEQ ID NO: 1064 - DNA, 20 bp, Artificial Sequence
  Antisense Oligonucleotide
ttcaaatataattatcacaa

SEQ ID NO: 1065 - DNA, 19 bp, Artificial Sequence
  Antisense Oligonucleotide
tatttaaatcacacaacat

SEQ ID NO: 1066 - DNA, 18 bp, Artificial Sequence
  Antisense Oligonucleotide
tgttctataactaataat

SEQ ID NO: 1067 - DNA, 18 bp, Artificial Sequence
  Antisense Oligonucleotide
ttcatttaactttcaacc

SEQ ID NO: 1068 - DNA, 19 bp, Artificial Sequence
  Antisense Oligonucleotide
tttcatttaactttcaacc

SEQ ID NO: 1069 - DNA, 20 bp, Artificial Sequence
  Antisense Oligonucleotide
atttcatttaactttcaacc

SEQ ID NO: 1070 - DNA, 19 bp, Artificial Sequence
  Antisense Oligonucleotide
atttcatttaactttcaac

SEQ ID NO: 1071 - DNA, 20 bp, Artificial Sequence
  Antisense Oligonucleotide
catttcatttaactttcaac

SEQ ID NO: 1072 - DNA, 19 bp, Artificial Sequence
  Antisense Oligonucleotide
catttcatttaactttcaa

SEQ ID NO: 1073 - DNA, 19 bp, Artificial Sequence
  Antisense Oligonucleotide
gcatttcatttaactttca

SEQ ID NO: 1074 - DNA, 18 bp, Artificial Sequence
  Antisense Oligonucleotide
gcatttcatttaactttc

SEQ ID NO: 1075 - DNA, 18 bp, Artificial Sequence
  Antisense Oligonucleotide
aagcatttcatttaactt

SEQ ID NO: 1076 - DNA, 17 bp, Artificial Sequence
  Antisense Oligonucleotide
taattgtctttaactcc

SEQ ID NO: 1077 - DNA, 20 bp, Artificial Sequence
  Antisense Oligonucleotide
cttctcacattcatcatatt

SEQ ID NO: 1078 - DNA, 19 bp, Artificial Sequence
  Antisense Oligonucleotide
ataatttttcctatctcca

SEQ ID NO: 1079 - DNA, 20 bp, Artificial Sequence
  Antisense Oligonucleotide
aataatttttcctatctcca

SEQ ID NO: 1080 - DNA, 18 bp, Artificial Sequence
  Antisense Oligonucleotide
ataatttttcctatctcc

SEQ ID NO: 1081 - DNA, 19 bp, Artificial Sequence
  Antisense Oligonucleotide
gaataatttttcctatctc

SEQ ID NO: 1082 - DNA, 17 bp, Artificial Sequence
  Antisense Oligonucleotide
tccccaataaacttcaa

SEQ ID NO: 1083 - DNA, 18 bp, Artificial Sequence
  Antisense Oligonucleotide
ttccccaataaacttcaa

SEQ ID NO: 1084 - DNA, 20 bp, Artificial Sequence
  Antisense Oligonucleotide
tattccccaataaacttcaa

SEQ ID NO: 1085 - DNA, 18 bp, Artificial Sequence
  Antisense Oligonucleotide
attccccaataaacttca

SEQ ID NO: 1086 - DNA, 20 bp, Artificial Sequence
  Antisense Oligonucleotide
atattccccaataaacttca

SEQ ID NO: 1087 - DNA, 20 bp, Artificial Sequence
  Antisense Oligonucleotide
aatattccccaataaacttc

SEQ ID NO: 1088 - DNA, 18 bp, Artificial Sequence
  Antisense Oligonucleotide
caatattccccaataaac

SEQ ID NO: 1089 - DNA, 19 bp, Artificial Sequence
  Antisense Oligonucleotide
cttcacaatttaaattcaa

SEQ ID NO: 1090 - DNA, 20 bp, Artificial Sequence
  Antisense Oligonucleotide
acttcacaatttaaattcaa

SEQ ID NO: 1091 - DNA, 20 bp, Artificial Sequence
  Antisense Oligonucleotide
cacttcacaatttaaattca

SEQ ID NO: 1092 - DNA, 19 bp, Artificial Sequence
  Antisense Oligonucleotide
cacttcacaatttaaattc

SEQ ID NO: 1093 - DNA, 20 bp, Artificial Sequence
  Antisense Oligonucleotide
acacttcacaatttaaattc

SEQ ID NO: 1094 - DNA, 19 bp, Artificial Sequence
  Antisense Oligonucleotide
acacttcacaatttaaatt

SEQ ID NO: 1095 - DNA, 18 bp, Artificial Sequence
  Antisense Oligonucleotide
acacttcacaatttaaat

SEQ ID NO: 1096 - DNA, 19 bp, Artificial Sequence
  Antisense Oligonucleotide
gacacttcacaatttaaat

SEQ ID NO: 1097 - DNA, 19 bp, Artificial Sequence
  Antisense Oligonucleotide
agacacttcacaatttaaa

SEQ ID NO: 1098 - DNA, 18 bp, Artificial Sequence
  Antisense Oligonucleotide
tagacacttcacaattta

SEQ ID NO: 1099 - DNA, 18 bp, Artificial Sequence
  Antisense Oligonucleotide
atagacacttcacaattt

SEQ ID NO: 1100 - DNA, 18 bp, Artificial Sequence
  Antisense Oligonucleotide
ttgacatacaaacccaaa

SEQ ID NO: 1101 - DNA, 18 bp, Artificial Sequence
  Antisense Oligonucleotide
cacttgacatacaaaccc

SEQ ID NO: 1102 - DNA, 17 bp, Artificial Sequence
  Antisense Oligonucleotide
cacttgacatacaaacc

SEQ ID NO: 1103 - DNA, 17 bp, Artificial Sequence
  Antisense Oligonucleotide
ccacttgacatacaaac

SEQ ID NO: 1104 - DNA, 16 bp, Artificial Sequence
  Antisense Oligonucleotide
tatagagatgaagtta

SEQ ID NO: 1105 - DNA, 16 bp, Artificial Sequence
  Antisense Oligonucleotide
ctatagagatgaagtt

SEQ ID NO: 1106 - DNA, 18 bp, Artificial Sequence
  Antisense Oligonucleotide
ccttgaaaacttccataa

SEQ ID NO: 1107 - DNA, 18 bp, Artificial Sequence
  Antisense Oligonucleotide
cagatattcctttaaacc

SEQ ID NO: 1108 - DNA, 18 bp, Artificial Sequence
  Antisense Oligonucleotide
tcagatattcctttaaac

SEQ ID NO: 1109 - DNA, 20 bp, Artificial Sequence
  Antisense Oligonucleotide
tattaatcaaatatttacta

SEQ ID NO: 1110 - DNA, 20 bp, Artificial Sequence
  Antisense Oligonucleotide
attattaatcaaatatttac

SEQ ID NO: 1111 - DNA, 20 bp, Artificial Sequence
  Antisense Oligonucleotide
tattattaatcaaatattta

SEQ ID NO: 1112 - DNA, 20 bp, Artificial Sequence
  Antisense Oligonucleotide
ctattattaatcaaatattt

SEQ ID NO: 1113 - DNA, 19 bp, Artificial Sequence
  Antisense Oligonucleotide
ctattattaatcaaatatt

SEQ ID NO: 1114 - DNA, 18 bp, Artificial Sequence
  Antisense Oligonucleotide
ctattattaatcaaatat

SEQ ID NO: 1115 - DNA, 18 bp, Artificial Sequence
  Antisense Oligonucleotide
gctattattaatcaaata

SEQ ID NO: 1116 - DNA, 18 bp, Artificial Sequence
  Antisense Oligonucleotide
tgccattaacttttttat

SEQ ID NO: 1117 - DNA, 19 bp, Artificial Sequence
  Antisense Oligonucleotide
catatcacctcctccaaaa

SEQ ID NO: 1118 - DNA, 18 bp, Artificial Sequence
  Antisense Oligonucleotide
tacagcatatcacctcct

SEQ ID NO: 1119 - DNA, 18 bp, Artificial Sequence
  Antisense Oligonucleotide
ctacagcatatcacctcc

SEQ ID NO: 1120 - DNA, 17 bp, Artificial Sequence
  Antisense Oligonucleotide
ctacagcatatcacctc

SEQ ID NO: 1121 - DNA, 17 bp, Artificial Sequence
  Antisense Oligonucleotide
ctctacagcatatcacc

SEQ ID NO: 1122 - DNA, 19 bp, Artificial Sequence
  Antisense Oligonucleotide
gacttctattaaaaattca

SEQ ID NO: 1123 - DNA, 18 bp, Artificial Sequence
  Antisense Oligonucleotide
gacttctattaaaaattc

SEQ ID NO: 1124 - DNA, 19 bp, Artificial Sequence
  Antisense Oligonucleotide
tttacttatttactcataa

SEQ ID NO: 1125 - DNA, 20 bp, Artificial Sequence
  Antisense Oligonucleotide
accactaactccatttaatt

SEQ ID NO: 1126 - DNA, 18 bp, Artificial Sequence
  Antisense Oligonucleotide
cactaactccatttaatt

SEQ ID NO: 1127 - DNA, 19 bp, Artificial Sequence
  Antisense Oligonucleotide
ccactaactccatttaatt

SEQ ID NO: 1128 - DNA, 19 bp, Artificial Sequence
  Antisense Oligonucleotide
accactaactccatttaat

SEQ ID NO: 1129 - DNA, 20 bp, Artificial Sequence
  Antisense Oligonucleotide
aaccactaactccatttaat

SEQ ID NO: 1130 - DNA, 18 bp, Artificial Sequence
  Antisense Oligonucleotide
ccactaactccatttaat

SEQ ID NO: 1131 - DNA, 19 bp, Artificial Sequence
  Antisense Oligonucleotide
aaccactaactccatttaa

SEQ ID NO: 1132 - DNA, 20 bp, Artificial Sequence
  Antisense Oligonucleotide
aaaccactaactccatttaa

SEQ ID NO: 1133 - DNA, 18 bp, Artificial Sequence
  Antisense Oligonucleotide
accactaactccatttaa

SEQ ID NO: 1134 - DNA, 18 bp, Artificial Sequence
  Antisense Oligonucleotide
aaccactaactccattta

SEQ ID NO: 1135 - DNA, 19 bp, Artificial Sequence
  Antisense Oligonucleotide
aaaccactaactccattta

SEQ ID NO: 1136 - DNA, 17 bp, Artificial Sequence
  Antisense Oligonucleotide
aaccactaactccattt

SEQ ID NO: 1137 - DNA, 18 bp, Artificial Sequence
  Antisense Oligonucleotide
aaaccactaactccattt

SEQ ID NO: 1138 - DNA, 17 bp, Artificial Sequence
  Antisense Oligonucleotide
tgctatacaaatctacc

SEQ ID NO: 1139 - DNA, 18 bp, Artificial Sequence
  Antisense Oligonucleotide
tcaccacattaattaaac

SEQ ID NO: 1140 - DNA, 19 bp, Artificial Sequence
  Antisense Oligonucleotide
atcaccacattaattaaac

SEQ ID NO: 1141 - DNA, 19 bp, Artificial Sequence
  Antisense Oligonucleotide
gatcaccacattaattaaa

SEQ ID NO: 1142 - DNA, 18 bp, Artificial Sequence
  Antisense Oligonucleotide
atcaccacattaattaaa

SEQ ID NO: 1143 - DNA, 18 bp, Artificial Sequence
  Antisense Oligonucleotide
gatcaccacattaattaa

SEQ ID NO: 1144 - DNA, 17 bp, Artificial Sequence
  Antisense Oligonucleotide
gatcaccacattaatta

SEQ ID NO: 1145 - DNA, 17 bp, Artificial Sequence
  Antisense Oligonucleotide
tagatcaccacattaat

SEQ ID NO: 1146 - DNA, 18 bp, Artificial Sequence
  Antisense Oligonucleotide
atagatcaccacattaat

SEQ ID NO: 1147 - DNA, 17 bp, Artificial Sequence
  Antisense Oligonucleotide
atagatcaccacattaa

SEQ ID NO: 1148 - DNA, 18 bp, Artificial Sequence
  Antisense Oligonucleotide
tattaaaatccttcaact

SEQ ID NO: 1149 - DNA, 20 bp, Artificial Sequence
  Antisense Oligonucleotide
tatattaaaatccttcaact

SEQ ID NO: 1150 - DNA, 19 bp, Artificial Sequence
  Antisense Oligonucleotide
tatattaaaatccttcaac

SEQ ID NO: 1151 - DNA, 20 bp, Artificial Sequence
  Antisense Oligonucleotide
ttatattaaaatccttcaac

SEQ ID NO: 1152 - DNA, 19 bp, Artificial Sequence
  Antisense Oligonucleotide
ttatattaaaatccttcaa

SEQ ID NO: 1153 - DNA, 20 bp, Artificial Sequence
  Antisense Oligonucleotide
attatattaaaatccttcaa

SEQ ID NO: 1154 - DNA, 20 bp, Artificial Sequence
  Antisense Oligonucleotide
tattatattaaaatccttca

SEQ ID NO: 1155 - DNA, 19 bp, Artificial Sequence
  Antisense Oligonucleotide
tattatattaaaatccttc

SEQ ID NO: 1156 - DNA, 20 bp, Artificial Sequence
  Antisense Oligonucleotide
atattatattaaaatccttc

SEQ ID NO: 1157 - DNA, 20 bp, Artificial Sequence
  Antisense Oligonucleotide
tatattatattaaaatcctt

SEQ ID NO: 1158 - DNA, 19 bp, Artificial Sequence
  Antisense Oligonucleotide
tatattatattaaaatcct

SEQ ID NO: 1159 - DNA, 20 bp, Artificial Sequence
  Antisense Oligonucleotide
ttctctatttatttctacct

SEQ ID NO: 1160 - DNA, 18 bp, Artificial Sequence
  Antisense Oligonucleotide
tctctatttatttctacc

SEQ ID NO: 1161 - DNA, 20 bp, Artificial Sequence
  Antisense Oligonucleotide
aatttctctatttatttcta

SEQ ID NO: 1162 - DNA, 20 bp, Artificial Sequence
  Antisense Oligonucleotide
taaatttctctatttatttc

SEQ ID NO: 1163 - DNA, 20 bp, Artificial Sequence
  Antisense Oligonucleotide
tttctaaatttctctattta

SEQ ID NO: 1164 - DNA, 17 bp, Artificial Sequence
  Antisense Oligonucleotide
caatgcttaatacttat

SEQ ID NO: 1165 - DNA, 17 bp, Artificial Sequence
  Antisense Oligonucleotide
ccaatgcttaatactta

SEQ ID NO: 1166 - DNA, 20 bp, Artificial Sequence
  Antisense Oligonucleotide
ttccataaaatatttaacct

SEQ ID NO: 1167 - DNA, 20 bp, Artificial Sequence
  Antisense Oligonucleotide
atcatttccataaaatattt

SEQ ID NO: 1168 - DNA, 20 bp, Artificial Sequence
  Antisense Oligonucleotide
aatcatttccataaaatatt

SEQ ID NO: 1169 - DNA, 18 bp, Artificial Sequence
  Antisense Oligonucleotide
ctgataaatcattataat

SEQ ID NO: 1170 - DNA, 18 bp, Artificial Sequence
  Antisense Oligonucleotide
tcaaattcctaaatcata

SEQ ID NO: 1171 - DNA, 19 bp, Artificial Sequence
  Antisense Oligonucleotide
tacattaactaaaaaccaa

SEQ ID NO: 1172 - DNA, 20 bp, Artificial Sequence
  Antisense Oligonucleotide
ttacattaactaaaaaccaa

SEQ ID NO: 1173 - DNA, 18 bp, Artificial Sequence
  Antisense Oligonucleotide
tacattaactaaaaacca

SEQ ID NO: 1174 - DNA, 19 bp, Artificial Sequence
  Antisense Oligonucleotide
ttacattaactaaaaacca

SEQ ID NO: 1175 - DNA, 18 bp, Artificial Sequence
  Antisense Oligonucleotide
ttacattaactaaaaacc

SEQ ID NO: 1176 - DNA, 19 bp, Artificial Sequence
  Antisense Oligonucleotide
gttacattaactaaaaacc

SEQ ID NO: 1177 - DNA, 18 bp, Artificial Sequence
  Antisense Oligonucleotide
catgttacattaactaaa

SEQ ID NO: 1178 - DNA, 17 bp, Artificial Sequence
  Antisense Oligonucleotide
tcatgttacattaacta

SEQ ID NO: 1179 - DNA, 16 bp, Artificial Sequence
  Antisense Oligonucleotide
gggatttgagtagatt

SEQ ID NO: 1180 - DNA, 16 bp, Artificial Sequence
  Antisense Oligonucleotide
caaagacacaatagtg

SEQ ID NO: 1181 - DNA, 16 bp, Artificial Sequence
  Antisense Oligonucleotide
gcaaagacacaatagt

SEQ ID NO: 1182 - DNA, 20 bp, Artificial Sequence
  Antisense Oligonucleotide
cataatatcaaatatttact

SEQ ID NO: 1183 - DNA, 19 bp, Artificial Sequence
  Antisense Oligonucleotide
cataatatcaaatatttac

SEQ ID NO: 1184 - DNA, 20 bp, Artificial Sequence
  Antisense Oligonucleotide
tcataatatcaaatatttac

SEQ ID NO: 1185 - DNA, 19 bp, Artificial Sequence
  Antisense Oligonucleotide
tcataatatcaaatattta

SEQ ID NO: 1186 - DNA, 20 bp, Artificial Sequence
  Antisense Oligonucleotide
agaacaaacaaacaacacac

SEQ ID NO: 1187 - DNA, 18 bp, Artificial Sequence
  Antisense Oligonucleotide
atgttaaactatattcaa

SEQ ID NO: 1188 - DNA, 20 bp, Artificial Sequence
  Antisense Oligonucleotide
tttctatcaacattttctac

SEQ ID NO: 1189 - DNA, 19 bp, Artificial Sequence
  Antisense Oligonucleotide
attttctatcaacattttc

SEQ ID NO: 1190 - DNA, 20 bp, Artificial Sequence
  Antisense Oligonucleotide
aattttctatcaacattttc

SEQ ID NO: 1191 - DNA, 19 bp, Artificial Sequence
  Antisense Oligonucleotide
aattttctatcaacatttt

SEQ ID NO: 1192 - DNA, 20 bp, Artificial Sequence
  Antisense Oligonucleotide
taattttctatcaacatttt

SEQ ID NO: 1193 - DNA, 19 bp, Artificial Sequence
  Antisense Oligonucleotide
taattttctatcaacattt

SEQ ID NO: 1194 - DNA, 20 bp, Artificial Sequence
  Antisense Oligonucleotide
ataattttctatcaacattt

SEQ ID NO: 1195 - DNA, 19 bp, Artificial Sequence
  Antisense Oligonucleotide
ataattttctatcaacatt

SEQ ID NO: 1196 - DNA, 20 bp, Artificial Sequence
  Antisense Oligonucleotide
tataattttctatcaacatt

SEQ ID NO: 1197 - DNA, 19 bp, Artificial Sequence
  Antisense Oligonucleotide
tataattttctatcaacat

SEQ ID NO: 1198 - DNA, 20 bp, Artificial Sequence
  Antisense Oligonucleotide
ctataattttctatcaacat

SEQ ID NO: 1199 - DNA, 19 bp, Artificial Sequence
  Antisense Oligonucleotide
ctataattttctatcaaca

SEQ ID NO: 1200 - DNA, 20 bp, Artificial Sequence
  Antisense Oligonucleotide
tctataattttctatcaaca

SEQ ID NO: 1201 - DNA, 18 bp, Artificial Sequence
  Antisense Oligonucleotide
ctataattttctatcaac

SEQ ID NO: 1202 - DNA, 19 bp, Artificial Sequence
  Antisense Oligonucleotide
tctataattttctatcaac

SEQ ID NO: 1203 - DNA, 20 bp, Artificial Sequence
  Antisense Oligonucleotide
atctataattttctatcaac

SEQ ID NO: 1204 - DNA, 18 bp, Artificial Sequence
  Antisense Oligonucleotide
tctataattttctatcaa

SEQ ID NO: 1205 - DNA, 19 bp, Artificial Sequence
  Antisense Oligonucleotide
atctataattttctatcaa

SEQ ID NO: 1206 - DNA, 20 bp, Artificial Sequence
  Antisense Oligonucleotide
aatctataattttctatcaa

SEQ ID NO: 1207 - DNA, 18 bp, Artificial Sequence
  Antisense Oligonucleotide
atctataattttctatca

SEQ ID NO: 1208 - DNA, 19 bp, Artificial Sequence
  Antisense Oligonucleotide
aatctataattttctatca

SEQ ID NO: 1209 - DNA, 18 bp, Artificial Sequence
  Antisense Oligonucleotide
ctactaccaaatctataa

SEQ ID NO: 1210 - DNA, 19 bp, Artificial Sequence
  Antisense Oligonucleotide
tccttttccaattatatat

SEQ ID NO: 1211 - DNA, 20 bp, Artificial Sequence
  Antisense Oligonucleotide
ctccttttccaattatatat

SEQ ID NO: 1212 - DNA, 19 bp, Artificial Sequence
  Antisense Oligonucleotide
ctccttttccaattatata

SEQ ID NO: 1213 - DNA, 20 bp, Artificial Sequence
  Antisense Oligonucleotide
cctccttttccaattatata

SEQ ID NO: 1214 - DNA, 18 bp, Artificial Sequence
  Antisense Oligonucleotide
ctccttttccaattatat

SEQ ID NO: 1215 - DNA, 19 bp, Artificial Sequence
  Antisense Oligonucleotide
cctccttttccaattatat

SEQ ID NO: 1216 - DNA, 20 bp, Artificial Sequence
  Antisense Oligonucleotide
acctccttttccaattatat

SEQ ID NO: 1217 - DNA, 16 bp, Artificial Sequence
  Antisense Oligonucleotide
attgtttacatactct

SEQ ID NO: 1218 - DNA, 18 bp, Artificial Sequence
  Antisense Oligonucleotide
atgttatttaatcatcaa

SEQ ID NO: 1219 - DNA, 18 bp, Artificial Sequence
  Antisense Oligonucleotide
gaatttacataatctttt

SEQ ID NO: 1220 - DNA, 18 bp, Artificial Sequence
  Antisense Oligonucleotide
cagaatttacataatctt

SEQ ID NO: 1221 - DNA, 18 bp, Artificial Sequence
  Antisense Oligonucleotide
acagaatttacataatct

SEQ ID NO: 1222 - DNA, 19 bp, Artificial Sequence
  Antisense Oligonucleotide
gttatcaaaaaattacaat

SEQ ID NO: 1223 - DNA, 20 bp, Artificial Sequence
  Antisense Oligonucleotide
aaaataccttttattctctc

SEQ ID NO: 1224 - DNA, 17 bp, Artificial Sequence
  Antisense Oligonucleotide
gatattatattaaccca

SEQ ID NO: 1225 - DNA, 19 bp, Artificial Sequence
  Antisense Oligonucleotide
ttatttttaccacaaacaa

SEQ ID NO: 1226 - DNA, 20 bp, Artificial Sequence
  Antisense Oligonucleotide
tttatttttaccacaaacaa

SEQ ID NO: 1227 - DNA, 19 bp, Artificial Sequence
  Antisense Oligonucleotide
tttatttttaccacaaaca

SEQ ID NO: 1228 - DNA, 20 bp, Artificial Sequence
  Antisense Oligonucleotide
atttatttttaccacaaaca

SEQ ID NO: 1229 - DNA, 19 bp, Artificial Sequence
  Antisense Oligonucleotide
atttatttttaccacaaac

SEQ ID NO: 1230 - DNA, 20 bp, Artificial Sequence
  Antisense Oligonucleotide
tatttatttttaccacaaac

SEQ ID NO: 1231 - DNA, 18 bp, Artificial Sequence
  Antisense Oligonucleotide
aatttcaactccaattta

SEQ ID NO: 1232 - DNA, 19 bp, Artificial Sequence
  Antisense Oligonucleotide
aaatttcaactccaattta

SEQ ID NO: 1233 - DNA, 20 bp, Artificial Sequence
  Antisense Oligonucleotide
taaatttcaactccaattta

SEQ ID NO: 1234 - DNA, 19 bp, Artificial Sequence
  Antisense Oligonucleotide
taaatttcaactccaattt

SEQ ID NO: 1235 - DNA, 18 bp, Artificial Sequence
  Antisense Oligonucleotide
aattttatccctatacct

SEQ ID NO: 1236 - DNA, 19 bp, Artificial Sequence
  Antisense Oligonucleotide
caattttatccctatacct

SEQ ID NO: 1237 - DNA, 17 bp, Artificial Sequence
  Antisense Oligonucleotide
aattttatccctatacc

SEQ ID NO: 1238 - DNA, 18 bp, Artificial Sequence
  Antisense Oligonucleotide
caattttatccctatacc

SEQ ID NO: 1239 - DNA, 19 bp, Artificial Sequence
  Antisense Oligonucleotide
acaattttatccctatacc

SEQ ID NO: 1240 - DNA, 20 bp, Artificial Sequence
  Antisense Oligonucleotide
cacaattttatccctatacc

SEQ ID NO: 1241 - DNA, 18 bp, Artificial Sequence
  Antisense Oligonucleotide
acaattttatccctatac

SEQ ID NO: 1242 - DNA, 19 bp, Artificial Sequence
  Antisense Oligonucleotide
cacaattttatccctatac

SEQ ID NO: 1243 - DNA, 18 bp, Artificial Sequence
  Antisense Oligonucleotide
cacaattttatccctata

SEQ ID NO: 1244 - DNA, 19 bp, Artificial Sequence
  Antisense Oligonucleotide
aacaacaaacacttcatat

SEQ ID NO: 1245 - DNA, 20 bp, Artificial Sequence
  Antisense Oligonucleotide
taacaacaaacacttcatat

SEQ ID NO: 1246 - DNA, 19 bp, Artificial Sequence
  Antisense Oligonucleotide
taacaacaaacacttcata

SEQ ID NO: 1247 - DNA, 20 bp, Artificial Sequence
  Antisense Oligonucleotide
ataacaacaaacacttcata

SEQ ID NO: 1248 - DNA, 18 bp, Artificial Sequence
  Antisense Oligonucleotide
taacaacaaacacttcat

SEQ ID NO: 1249 - DNA, 19 bp, Artificial Sequence
  Antisense Oligonucleotide
ataacaacaaacacttcat

SEQ ID NO: 1250 - DNA, 20 bp, Artificial Sequence
  Antisense Oligonucleotide
tataacaacaaacacttcat

SEQ ID NO: 1251 - DNA, 18 bp, Artificial Sequence
  Antisense Oligonucleotide
ataacaacaaacacttca

SEQ ID NO: 1252 - DNA, 18 bp, Artificial Sequence
  Antisense Oligonucleotide
tataacaacaaacacttc

SEQ ID NO: 1253 - DNA, 19 bp, Artificial Sequence
  Antisense Oligonucleotide
atataacaacaaacacttc

SEQ ID NO: 1254 - DNA, 20 bp, Artificial Sequence
  Antisense Oligonucleotide
aatataacaacaaacacttc

SEQ ID NO: 1255 - DNA, 18 bp, Artificial Sequence
  Antisense Oligonucleotide
atataacaacaaacactt

SEQ ID NO: 1256 - DNA, 19 bp, Artificial Sequence
  Antisense Oligonucleotide
gaatataacaacaaacact

SEQ ID NO: 1257 - DNA, 19 bp, Artificial Sequence
  Antisense Oligonucleotide
agaatataacaacaaacac

SEQ ID NO: 1258 - DNA, 20 bp, Artificial Sequence
  Antisense Oligonucleotide
cttaacttttacaaattaat

SEQ ID NO: 1259 - DNA, 19 bp, Artificial Sequence
  Antisense Oligonucleotide
cttaacttttacaaattaa

SEQ ID NO: 1260 - DNA, 20 bp, Artificial Sequence
  Antisense Oligonucleotide
tcttaacttttacaaattaa

SEQ ID NO: 1261 - DNA, 19 bp, Artificial Sequence
  Antisense Oligonucleotide
tcttaacttttacaaatta

SEQ ID NO: 1262 - DNA, 20 bp, Artificial Sequence
  Antisense Oligonucleotide
ttcttaacttttacaaatta

SEQ ID NO: 1263 - DNA, 19 bp, Artificial Sequence
  Antisense Oligonucleotide
ttcttaacttttacaaatt

SEQ ID NO: 1264 - DNA, 18 bp, Artificial Sequence
  Antisense Oligonucleotide
gttcttaacttttacaaa

SEQ ID NO: 1265 - DNA, 18 bp, Artificial Sequence
  Antisense Oligonucleotide
aagttcttaacttttaca

SEQ ID NO: 1266 - DNA, 18 bp, Artificial Sequence
  Antisense Oligonucleotide
tgattaacatttaactat

SEQ ID NO: 1267 - DNA, 19 bp, Artificial Sequence
  Antisense Oligonucleotide
aagtacatacacatcacca

SEQ ID NO: 1268 - DNA, 18 bp, Artificial Sequence
  Antisense Oligonucleotide
aagtacatacacatcacc

SEQ ID NO: 1269 - DNA, 19 bp, Artificial Sequence
  Antisense Oligonucleotide
actttctcattaatattta

SEQ ID NO: 1270 - DNA, 20 bp, Artificial Sequence
  Antisense Oligonucleotide
aactttctcattaatattta

SEQ ID NO: 1271 - DNA, 20 bp, Artificial Sequence
  Antisense Oligonucleotide
taactttctcattaatattt

SEQ ID NO: 1272 - DNA, 19 bp, Artificial Sequence
  Antisense Oligonucleotide
taactttctcattaatatt

SEQ ID NO: 1273 - DNA, 20 bp, Artificial Sequence
  Antisense Oligonucleotide
ttaactttctcattaatatt

SEQ ID NO: 1274 - DNA, 19 bp, Artificial Sequence
  Antisense Oligonucleotide
ttaactttctcattaatat

SEQ ID NO: 1275 - DNA, 20 bp, Artificial Sequence
  Antisense Oligonucleotide
attaactttctcattaatat

SEQ ID NO: 1276 - DNA, 19 bp, Artificial Sequence
  Antisense Oligonucleotide
attaactttctcattaata

SEQ ID NO: 1277 - DNA, 20 bp, Artificial Sequence
  Antisense Oligonucleotide
cattaactttctcattaata

SEQ ID NO: 1278 - DNA, 18 bp, Artificial Sequence
  Antisense Oligonucleotide
attaactttctcattaat

SEQ ID NO: 1279 - DNA, 19 bp, Artificial Sequence
  Antisense Oligonucleotide
cattaactttctcattaat

SEQ ID NO: 1280 - DNA, 20 bp, Artificial Sequence
  Antisense Oligonucleotide
tcattaactttctcattaat

SEQ ID NO: 1281 - DNA, 20 bp, Artificial Sequence
  Antisense Oligonucleotide
atcattaactttctcattaa

SEQ ID NO: 1282 - DNA, 19 bp, Artificial Sequence
  Antisense Oligonucleotide
atcattaactttctcatta

SEQ ID NO: 1283 - DNA, 20 bp, Artificial Sequence
  Antisense Oligonucleotide
acatcattaactttctcatt

SEQ ID NO: 1284 - DNA, 18 bp, Artificial Sequence
  Antisense Oligonucleotide
catcattaactttctcat

SEQ ID NO: 1285 - DNA, 19 bp, Artificial Sequence
  Antisense Oligonucleotide
acatcattaactttctcat

SEQ ID NO: 1286 - DNA, 19 bp, Artificial Sequence
  Antisense Oligonucleotide
gacatcattaactttctca

SEQ ID NO: 1287 - DNA, 18 bp, Artificial Sequence
  Antisense Oligonucleotide
gacatcattaactttctc

SEQ ID NO: 1288 - DNA, 19 bp, Artificial Sequence
  Antisense Oligonucleotide
cgacatcattaactttctc

SEQ ID NO: 1289 - DNA, 18 bp, Artificial Sequence
  Antisense Oligonucleotide
cgacatcattaactttct

SEQ ID NO: 1290 - DNA, 17 bp, Artificial Sequence
  Antisense Oligonucleotide
cgacatcattaactttc

SEQ ID NO: 1291 - DNA, 17 bp, Artificial Sequence
  Antisense Oligonucleotide
acgacatcattaacttt

SEQ ID NO: 1292 - DNA, 18 bp, Artificial Sequence
  Antisense Oligonucleotide
aacgacatcattaacttt

SEQ ID NO: 1293 - DNA, 17 bp, Artificial Sequence
  Antisense Oligonucleotide
aacgacatcattaactt

SEQ ID NO: 1294 - DNA, 18 bp, Artificial Sequence
  Antisense Oligonucleotide
gcatacatatttaacaca

SEQ ID NO: 1295 - DNA, 19 bp, Artificial Sequence
  Antisense Oligonucleotide
agcatacatatttaacaca

SEQ ID NO: 1296 - DNA, 18 bp, Artificial Sequence
  Antisense Oligonucleotide
agcatacatatttaacac

SEQ ID NO: 1297 - DNA, 19 bp, Artificial Sequence
  Antisense Oligonucleotide
cttcattctaatatttaaa

SEQ ID NO: 1298 - DNA, 20 bp, Artificial Sequence
  Antisense Oligonucleotide
tcttcattctaatatttaaa

SEQ ID NO: 1299 - DNA, 19 bp, Artificial Sequence
  Antisense Oligonucleotide
tcttcattctaatatttaa

SEQ ID NO: 1300 - DNA, 19 bp, Artificial Sequence
  Antisense Oligonucleotide
ccttcttcattctaatatt

SEQ ID NO: 1301 - DNA, 18 bp, Artificial Sequence
  Antisense Oligonucleotide
ccttcttcattctaatat

SEQ ID NO: 1302 - DNA, 19 bp, Artificial Sequence
  Antisense Oligonucleotide
tccttcttcattctaatat

SEQ ID NO: 1303 - DNA, 16 bp, Artificial Sequence
  Antisense Oligonucleotide
caggatccacaggcat

SEQ ID NO: 1304 - DNA, 16 bp, Artificial Sequence
  Antisense Oligonucleotide
catttcataagcctca

SEQ ID NO: 1305 - DNA, 16 bp, Artificial Sequence
  Antisense Oligonucleotide
gcatttcataagcctc

SEQ ID NO: 1306 - DNA, 16 bp, Artificial Sequence
  Antisense Oligonucleotide
ggcatttcataagcct

SEQ ID NO: 1307 - DNA, 16 bp, Artificial Sequence
  Antisense Oligonucleotide
aggcatttcataagcc

SEQ ID NO: 1308 - DNA, 16 bp, Artificial Sequence
  Antisense Oligonucleotide
aaggcatttcataagc

SEQ ID NO: 1309 - DNA, 20 bp, Artificial Sequence
  Antisense Oligonucleotide
ctaaaaatatattctctaat

SEQ ID NO: 1310 - DNA, 19 bp, Artificial Sequence
  Antisense Oligonucleotide
ctaaaaatatattctctaa

SEQ ID NO: 1311 - DNA, 20 bp, Artificial Sequence
  Antisense Oligonucleotide
tctaaaaatatattctctaa

SEQ ID NO: 1312 - DNA, 19 bp, Artificial Sequence
  Antisense Oligonucleotide
tctaaaaatatattctcta

SEQ ID NO: 1313 - DNA, 20 bp, Artificial Sequence
  Antisense Oligonucleotide
ttctaaaaatatattctcta

SEQ ID NO: 1314 - DNA, 17 bp, Artificial Sequence
  Antisense Oligonucleotide
ccctaactttccattta

SEQ ID NO: 1315 - DNA, 19 bp, Artificial Sequence
  Antisense Oligonucleotide
atttccctaactttccatt

SEQ ID NO: 1316 - DNA, 18 bp, Artificial Sequence
  Antisense Oligonucleotide
gatttccctaactttcca

SEQ ID NO: 1317 - DNA, 19 bp, Artificial Sequence
  Antisense Oligonucleotide
tgatttccctaactttcca

SEQ ID NO: 1318 - DNA, 18 bp, Artificial Sequence
  Antisense Oligonucleotide
gatacattttctattaaa

SEQ ID NO: 1319 - DNA, 18 bp, Artificial Sequence
  Antisense Oligonucleotide
tgatacattttctattaa

SEQ ID NO: 1320 - DNA, 18 bp, Artificial Sequence
  Antisense Oligonucleotide
agttttattcatctaaca

SEQ ID NO: 1321 - DNA, 18 bp, Artificial Sequence
  Antisense Oligonucleotide
agtattaattcctcttta

SEQ ID NO: 1322 - DNA, 19 bp, Artificial Sequence
  Antisense Oligonucleotide
ttaatctcaatttctataa

SEQ ID NO: 1323 - DNA, 20 bp, Artificial Sequence
  Antisense Oligonucleotide
tttaatctcaatttctataa

SEQ ID NO: 1324 - DNA, 20 bp, Artificial Sequence
  Antisense Oligonucleotide
aatttaatctcaatttctat

SEQ ID NO: 1325 - DNA, 19 bp, Artificial Sequence
  Antisense Oligonucleotide
aatttaatctcaatttcta

SEQ ID NO: 1326 - DNA, 20 bp, Artificial Sequence
  Antisense Oligonucleotide
caatttaatctcaatttcta

SEQ ID NO: 1327 - DNA, 19 bp, Artificial Sequence
  Antisense Oligonucleotide
caatttaatctcaatttct

SEQ ID NO: 1328 - DNA, 20 bp, Artificial Sequence
  Antisense Oligonucleotide
acaatttaatctcaatttct

SEQ ID NO: 1329 - DNA, 18 bp, Artificial Sequence
  Antisense Oligonucleotide
caatttaatctcaatttc

SEQ ID NO: 1330 - DNA, 19 bp, Artificial Sequence
  Antisense Oligonucleotide
acaatttaatctcaatttc

SEQ ID NO: 1331 - DNA, 20 bp, Artificial Sequence
  Antisense Oligonucleotide
aacaatttaatctcaatttc

SEQ ID NO: 1332 - DNA, 18 bp, Artificial Sequence
  Antisense Oligonucleotide
ttttcatcaaacctacca

SEQ ID NO: 1333 - DNA, 19 bp, Artificial Sequence
  Antisense Oligonucleotide
tttttcatcaaacctacca

SEQ ID NO: 1334 - DNA, 20 bp, Artificial Sequence
  Antisense Oligonucleotide
ttttttcatcaaacctacca

SEQ ID NO: 1335 - DNA, 19 bp, Artificial Sequence
  Antisense Oligonucleotide
ttttttcatcaaacctacc

SEQ ID NO: 1336 - DNA, 20 bp, Artificial Sequence
  Antisense Oligonucleotide
tttttttcatcaaacctacc

SEQ ID NO: 1337 - DNA, 18 bp, Artificial Sequence
  Antisense Oligonucleotide
ccagatcaacattacctc

SEQ ID NO: 1338 - DNA, 18 bp, Artificial Sequence
  Antisense Oligonucleotide
acccagatcaacattacc

SEQ ID NO: 1339 - DNA, 17 bp, Artificial Sequence
  Antisense Oligonucleotide
acccagatcaacattac

SEQ ID NO: 1340 - DNA, 17 bp, Artificial Sequence
  Antisense Oligonucleotide
cacccagatcaacatta

SEQ ID NO: 1341 - DNA, 17 bp, Artificial Sequence
  Antisense Oligonucleotide
ccacccagatcaacatt

SEQ ID NO: 1342 - DNA, 20 bp, Artificial Sequence
  Antisense Oligonucleotide
aatctatcaccattttcctt

SEQ ID NO: 1343 - DNA, 18 bp, Artificial Sequence
  Antisense Oligonucleotide
tctatcaccattttcctt

SEQ ID NO: 1344 - DNA, 19 bp, Artificial Sequence
  Antisense Oligonucleotide
aatctatcaccattttcct

SEQ ID NO: 1345 - DNA, 18 bp, Artificial Sequence
  Antisense Oligonucleotide
atctatcaccattttcct

SEQ ID NO: 1346 - DNA, 19 bp, Artificial Sequence
  Antisense Oligonucleotide
tcaatctatcaccattttc

SEQ ID NO: 1347 - DNA, 20 bp, Artificial Sequence
  Antisense Oligonucleotide
ttcaatctatcaccattttc

SEQ ID NO: 1348 - DNA, 18 bp, Artificial Sequence
  Antisense Oligonucleotide
caatctatcaccattttc

SEQ ID NO: 1349 - DNA, 18 bp, Artificial Sequence
  Antisense Oligonucleotide
cctaatactctataactt

SEQ ID NO: 1350 - DNA, 20 bp, Artificial Sequence
  Antisense Oligonucleotide
attatcctaatactctataa

SEQ ID NO: 1351 - DNA, 18 bp, Artificial Sequence
  Antisense Oligonucleotide
tatcctaatactctataa

SEQ ID NO: 1352 - DNA, 18 bp, Artificial Sequence
  Antisense Oligonucleotide
ttatcctaatactctata

SEQ ID NO: 1353 - DNA, 18 bp, Artificial Sequence
  Antisense Oligonucleotide
attatcctaatactctat

SEQ ID NO: 1354 - DNA, 18 bp, Artificial Sequence
  Antisense Oligonucleotide
atatttcttaggcttcag

SEQ ID NO: 1355 - DNA, 18 bp, Artificial Sequence
  Antisense Oligonucleotide
gatatttcttaggcttca

SEQ ID NO: 1356 - DNA, 18 bp, Artificial Sequence
  Antisense Oligonucleotide
agatatttcttaggcttc

SEQ ID NO: 1357 - DNA, 18 bp, Artificial Sequence
  Antisense Oligonucleotide
aagatatttcttaggctt

SEQ ID NO: 1358 - DNA, 18 bp, Artificial Sequence
  Antisense Oligonucleotide
aaagatatttcttaggct

SEQ ID NO: 1359 - DNA, 16 bp, Artificial Sequence
  Antisense Oligonucleotide
aagatatttcttaggc

SEQ ID NO: 1360 - DNA, 18 bp, Artificial Sequence
  Antisense Oligonucleotide
gcaaagatatttcttagg

SEQ ID NO: 1361 - DNA, 18 bp, Artificial Sequence
  Antisense Oligonucleotide
agcaaagatatttcttag

SEQ ID NO: 1362 - DNA, 18 bp, Artificial Sequence
  Antisense Oligonucleotide
gagcaaagatatttctta

SEQ ID NO: 1363 - DNA, 18 bp, Artificial Sequence
  Antisense Oligonucleotide
ggagcaaagatatttctt

SEQ ID NO: 1364 - DNA, 20 bp, Artificial Sequence
  Antisense Oligonucleotide
ctgggagcaaagatatttct

SEQ ID NO: 1365 - DNA, 18 bp, Artificial Sequence
  Antisense Oligonucleotide
tgggagcaaagatatttc

SEQ ID NO: 1366 - DNA, 18 bp, Artificial Sequence
  Antisense Oligonucleotide
ctgggagcaaagatattt

SEQ ID NO: 1367 - DNA, 16 bp, Artificial Sequence
  Antisense Oligonucleotide
tgggagcaaagatatt

SEQ ID NO: 1368 - DNA, 16 bp, Artificial Sequence
  Antisense Oligonucleotide
ctgggagcaaagatat

SEQ ID NO: 1369 - DNA, 16 bp, Artificial Sequence
  Antisense Oligonucleotide
actgggagcaaagata

SEQ ID NO: 1370 - DNA, 18 bp, Artificial Sequence
  Antisense Oligonucleotide
gaaactgggagcaaagat

SEQ ID NO: 1371 - DNA, 18 bp, Artificial Sequence
  Antisense Oligonucleotide
agaaactgggagcaaaga

SEQ ID NO: 1372 - DNA, 18 bp, Artificial Sequence
  Antisense Oligonucleotide
aagaaactgggagcaaag

SEQ ID NO: 1373 - DNA, 18 bp, Artificial Sequence
  Antisense Oligonucleotide
agatctcaagaaactggg

SEQ ID NO: 1374 - DNA, 16 bp, Artificial Sequence
  Antisense Oligonucleotide
gatctcaagaaactgg

SEQ ID NO: 1375 - DNA, 18 bp, Artificial Sequence
  Antisense Oligonucleotide
gcagatctcaagaaactg

SEQ ID NO: 1376 - DNA, 18 bp, Artificial Sequence
  Antisense Oligonucleotide
agcagatctcaagaaact

SEQ ID NO: 1377 - DNA, 16 bp, Artificial Sequence
  Antisense Oligonucleotide
gcagatctcaagaaac

SEQ ID NO: 1378 - DNA, 18 bp, Artificial Sequence
  Antisense Oligonucleotide
tcagcagatctcaagaaa

SEQ ID NO: 1379 - DNA, 18 bp, Artificial Sequence
  Antisense Oligonucleotide
gtcagcagatctcaagaa

SEQ ID NO: 1380 - DNA, 16 bp, Artificial Sequence
  Antisense Oligonucleotide
tcagcagatctcaaga

SEQ ID NO: 1381 - DNA, 18 bp, Artificial Sequence
  Antisense Oligonucleotide
gaactgagcacttgtaca

SEQ ID NO: 1382 - DNA, 18 bp, Artificial Sequence
  Antisense Oligonucleotide
ggaactgagcacttgtac

SEQ ID NO: 1383 - DNA, 18 bp, Artificial Sequence
  Antisense Oligonucleotide
tggaactgagcacttgta

SEQ ID NO: 1384 - DNA, 16 bp, Artificial Sequence
  Antisense Oligonucleotide
ggaactgagcacttgt

SEQ ID NO: 1385 - DNA, 18 bp, Artificial Sequence
  Antisense Oligonucleotide
attggaactgagcacttg

SEQ ID NO: 1386 - DNA, 16 bp, Artificial Sequence
  Antisense Oligonucleotide
ttggaactgagcactt

SEQ ID NO: 1387 - DNA, 18 bp, Artificial Sequence
  Antisense Oligonucleotide
acattggaactgagcact

SEQ ID NO: 1388 - DNA, 16 bp, Artificial Sequence
  Antisense Oligonucleotide
cattggaactgagcac

SEQ ID NO: 1389 - DNA, 18 bp, Artificial Sequence
  Antisense Oligonucleotide
cacattggaactgagcac

SEQ ID NO: 1390 - DNA, 18 bp, Artificial Sequence
  Antisense Oligonucleotide
aactttgagaaatgtcat

SEQ ID NO: 1391 - DNA, 18 bp, Artificial Sequence
  Antisense Oligonucleotide
aaactttgagaaatgtca

SEQ ID NO: 1392 - DNA, 16 bp, Artificial Sequence
  Antisense Oligonucleotide
tgctgatggaagactt

SEQ ID NO: 1393 - DNA, 16 bp, Artificial Sequence
  Antisense Oligonucleotide
ctgctgatggaagact

SEQ ID NO: 1394 - DNA, 16 bp, Artificial Sequence
  Antisense Oligonucleotide
actgctgatggaagac

SEQ ID NO: 1395 - DNA, 18 bp, Artificial Sequence
  Antisense Oligonucleotide
atcactgctgatggaaga

SEQ ID NO: 1396 - DNA, 16 bp, Artificial Sequence
  Antisense Oligonucleotide
ggcaggtacagatact

SEQ ID NO: 1397 - DNA, 20 bp, Artificial Sequence
  Antisense Oligonucleotide
aatccacagcacacaaagac

SEQ ID NO: 1398 - DNA, 18 bp, Artificial Sequence
  Antisense Oligonucleotide
atccacagcacacaaaga

SEQ ID NO: 1399 - DNA, 18 bp, Artificial Sequence
  Antisense Oligonucleotide
aatccacagcacacaaag

SEQ ID NO: 1400 - DNA, 18 bp, Artificial Sequence
  Antisense Oligonucleotide
aaatccacagcacacaaa

SEQ ID NO: 1401 - DNA, 18 bp, Artificial Sequence
  Antisense Oligonucleotide
gaaataagtggtagtcac

SEQ ID NO: 1402 - DNA, 18 bp, Artificial Sequence
  Antisense Oligonucleotide
agaaataagtggtagtca

SEQ ID NO: 1403 - DNA, 16 bp, Artificial Sequence
  Antisense Oligonucleotide
gaaataagtggtagtc

SEQ ID NO: 1404 - DNA, 16 bp, Artificial Sequence
  Antisense Oligonucleotide
agaaataagtggtagt

SEQ ID NO: 1405 - DNA, 18 bp, Artificial Sequence
  Antisense Oligonucleotide
ttagaaataagtggtagt

SEQ ID NO: 1406 - DNA, 16 bp, Artificial Sequence
  Antisense Oligonucleotide
tagaaataagtggtag

SEQ ID NO: 1407 - DNA, 18 bp, Artificial Sequence
  Antisense Oligonucleotide
tttagaaataagtggtag

SEQ ID NO: 1408 - DNA, 20 bp, Artificial Sequence
  Antisense Oligonucleotide
ggatttagaaataagtggta

SEQ ID NO: 1409 - DNA, 18 bp, Artificial Sequence
  Antisense Oligonucleotide
gatttagaaataagtggt

SEQ ID NO: 1410 - DNA, 18 bp, Artificial Sequence
  Antisense Oligonucleotide
ggatttagaaataagtgg

SEQ ID NO: 1411 - DNA, 20 bp, Artificial Sequence
  Antisense Oligonucleotide
tgaggatttagaaataagtg

SEQ ID NO: 1412 - DNA, 20 bp, Artificial Sequence
  Antisense Oligonucleotide
gtgaggatttagaaataagt

SEQ ID NO: 1413 - DNA, 18 bp, Artificial Sequence
  Antisense Oligonucleotide
tgaggatttagaaataag

SEQ ID NO: 1414 - DNA, 18 bp, Artificial Sequence
  Antisense Oligonucleotide
gtgaggatttagaaataa

SEQ ID NO: 1415 - DNA, 18 bp, Artificial Sequence
  Antisense Oligonucleotide
agtgaggatttagaaata

SEQ ID NO: 1416 - DNA, 18 bp, Artificial Sequence
  Antisense Oligonucleotide
tagtgaggatttagaaat

SEQ ID NO: 1417 - DNA, 18 bp, Artificial Sequence
  Antisense Oligonucleotide
atagtgaggatttagaaa

SEQ ID NO: 1418 - DNA, 18 bp, Artificial Sequence
  Antisense Oligonucleotide
aatagtgaggatttagaa

SEQ ID NO: 1419 - DNA, 16 bp, Artificial Sequence
  Antisense Oligonucleotide
aatagtgaggatttag

SEQ ID NO: 1420 - DNA, 20 bp, Artificial Sequence
  Antisense Oligonucleotide
ttctgaacaacagcaacaaa

SEQ ID NO: 1421 - DNA, 20 bp, Artificial Sequence
  Antisense Oligonucleotide
aacttctgaacaacagcaac

SEQ ID NO: 1422 - DNA, 20 bp, Artificial Sequence
  Antisense Oligonucleotide
caacttctgaacaacagcaa

SEQ ID NO: 1423 - DNA, 18 bp, Artificial Sequence
  Antisense Oligonucleotide
aacttctgaacaacagca

SEQ ID NO: 1424 - DNA, 19 bp, Artificial Sequence
  Antisense Oligonucleotide
caacttctgaacaacagca

SEQ ID NO: 1425 - DNA, 20 bp, Artificial Sequence
  Antisense Oligonucleotide
acaacttctgaacaacagca

SEQ ID NO: 1426 - DNA, 18 bp, Artificial Sequence
  Antisense Oligonucleotide
caacttctgaacaacagc

SEQ ID NO: 1427 - DNA, 17 bp, Artificial Sequence
  Antisense Oligonucleotide
aacttctgaacaacagc

SEQ ID NO: 1428 - DNA, 19 bp, Artificial Sequence
  Antisense Oligonucleotide
acaacttctgaacaacagc

SEQ ID NO: 1429 - DNA, 20 bp, Artificial Sequence
  Antisense Oligonucleotide
aacaacttctgaacaacagc

SEQ ID NO: 1430 - DNA, 18 bp, Artificial Sequence
  Antisense Oligonucleotide
acaacttctgaacaacag

SEQ ID NO: 1431 - DNA, 19 bp, Artificial Sequence
  Antisense Oligonucleotide
aacaacttctgaacaacag

SEQ ID NO: 1432 - DNA, 20 bp, Artificial Sequence
  Antisense Oligonucleotide
taacaacttctgaacaacag

SEQ ID NO: 1433 - DNA, 18 bp, Artificial Sequence
  Antisense Oligonucleotide
aacaacttctgaacaaca

SEQ ID NO: 1434 - DNA, 17 bp, Artificial Sequence
  Antisense Oligonucleotide
acaacttctgaacaaca

SEQ ID NO: 1435 - DNA, 19 bp, Artificial Sequence
  Antisense Oligonucleotide
taacaacttctgaacaaca

SEQ ID NO: 1436 - DNA, 20 bp, Artificial Sequence
  Antisense Oligonucleotide
ctaacaacttctgaacaaca

SEQ ID NO: 1437 - DNA, 16 bp, Artificial Sequence
  Antisense Oligonucleotide
acaacttctgaacaac

SEQ ID NO: 1438 - DNA, 19 bp, Artificial Sequence
  Antisense Oligonucleotide
ctaacaacttctgaacaac

SEQ ID NO: 1439 - DNA, 20 bp, Artificial Sequence
  Antisense Oligonucleotide
actaacaacttctgaacaac

SEQ ID NO: 1440 - DNA, 17 bp, Artificial Sequence
  Antisense Oligonucleotide
aacaacttctgaacaac

SEQ ID NO: 1441 - DNA, 18 bp, Artificial Sequence
  Antisense Oligonucleotide
taacaacttctgaacaac

SEQ ID NO: 1442 - DNA, 18 bp, Artificial Sequence
  Antisense Oligonucleotide
ctaacaacttctgaacaa

SEQ ID NO: 1443 - DNA, 19 bp, Artificial Sequence
  Antisense Oligonucleotide
actaacaacttctgaacaa

SEQ ID NO: 1444 - DNA, 20 bp, Artificial Sequence
  Antisense Oligonucleotide
cactaacaacttctgaacaa

SEQ ID NO: 1445 - DNA, 17 bp, Artificial Sequence
  Antisense Oligonucleotide
ctaacaacttctgaaca

SEQ ID NO: 1446 - DNA, 18 bp, Artificial Sequence
  Antisense Oligonucleotide
actaacaacttctgaaca

SEQ ID NO: 1447 - DNA, 19 bp, Artificial Sequence
  Antisense Oligonucleotide
cactaacaacttctgaaca

SEQ ID NO: 1448 - DNA, 20 bp, Artificial Sequence
  Antisense Oligonucleotide
tcactaacaacttctgaaca

SEQ ID NO: 1449 - DNA, 16 bp, Artificial Sequence
  Antisense Oligonucleotide
ctaacaacttctgaac

SEQ ID NO: 1450 - DNA, 18 bp, Artificial Sequence
  Antisense Oligonucleotide
cactaacaacttctgaac

SEQ ID NO: 1451 - DNA, 19 bp, Artificial Sequence
  Antisense Oligonucleotide
tcactaacaacttctgaac

SEQ ID NO: 1452 - DNA, 20 bp, Artificial Sequence
  Antisense Oligonucleotide
atcactaacaacttctgaac

SEQ ID NO: 1453 - DNA, 18 bp, Artificial Sequence
  Antisense Oligonucleotide
tcactaacaacttctgaa

SEQ ID NO: 1454 - DNA, 19 bp, Artificial Sequence
  Antisense Oligonucleotide
atcactaacaacttctgaa

SEQ ID NO: 1455 - DNA, 20 bp, Artificial Sequence
  Antisense Oligonucleotide
aatcactaacaacttctgaa

SEQ ID NO: 1456 - DNA, 16 bp, Artificial Sequence
  Antisense Oligonucleotide
cactaacaacttctga

SEQ ID NO: 1457 - DNA, 17 bp, Artificial Sequence
  Antisense Oligonucleotide
tcactaacaacttctga

SEQ ID NO: 1458 - DNA, 18 bp, Artificial Sequence
  Antisense Oligonucleotide
atcactaacaacttctga

SEQ ID NO: 1459 - DNA, 19 bp, Artificial Sequence
  Antisense Oligonucleotide
aatcactaacaacttctga

SEQ ID NO: 1460 - DNA, 20 bp, Artificial Sequence
  Antisense Oligonucleotide
aaatcactaacaacttctga

SEQ ID NO: 1461 - DNA, 16 bp, Artificial Sequence
  Antisense Oligonucleotide
tcactaacaacttctg

SEQ ID NO: 1462 - DNA, 17 bp, Artificial Sequence
  Antisense Oligonucleotide
atcactaacaacttctg

SEQ ID NO: 1463 - DNA, 18 bp, Artificial Sequence
  Antisense Oligonucleotide
aatcactaacaacttctg

SEQ ID NO: 1464 - DNA, 19 bp, Artificial Sequence
  Antisense Oligonucleotide
aaatcactaacaacttctg

SEQ ID NO: 1465 - DNA, 20 bp, Artificial Sequence
  Antisense Oligonucleotide
caaatcactaacaacttctg

SEQ ID NO: 1466 - DNA, 18 bp, Artificial Sequence
  Antisense Oligonucleotide
aaatcactaacaacttct

SEQ ID NO: 1467 - DNA, 19 bp, Artificial Sequence
  Antisense Oligonucleotide
caaatcactaacaacttct

SEQ ID NO: 1468 - DNA, 17 bp, Artificial Sequence
  Antisense Oligonucleotide
aatcactaacaacttct

SEQ ID NO: 1469 - DNA, 20 bp, Artificial Sequence
  Antisense Oligonucleotide
gcaaatcactaacaacttct

SEQ ID NO: 1470 - DNA, 18 bp, Artificial Sequence
  Antisense Oligonucleotide
caaatcactaacaacttc

SEQ ID NO: 1471 - DNA, 19 bp, Artificial Sequence
  Antisense Oligonucleotide
gcaaatcactaacaacttc

SEQ ID NO: 1472 - DNA, 20 bp, Artificial Sequence
  Antisense Oligonucleotide
agcaaatcactaacaacttc

SEQ ID NO: 1473 - DNA, 18 bp, Artificial Sequence
  Antisense Oligonucleotide
gcaaatcactaacaactt

SEQ ID NO: 1474 - DNA, 19 bp, Artificial Sequence
  Antisense Oligonucleotide
agcaaatcactaacaactt

SEQ ID NO: 1475 - DNA, 20 bp, Artificial Sequence
  Antisense Oligonucleotide
tagcaaatcactaacaactt

SEQ ID NO: 1476 - DNA, 18 bp, Artificial Sequence
  Antisense Oligonucleotide
agcaaatcactaacaact

SEQ ID NO: 1477 - DNA, 19 bp, Artificial Sequence
  Antisense Oligonucleotide
tagcaaatcactaacaact

SEQ ID NO: 1478 - DNA, 20 bp, Artificial Sequence
  Antisense Oligonucleotide
atagcaaatcactaacaact

SEQ ID NO: 1479 - DNA, 17 bp, Artificial Sequence
  Antisense Oligonucleotide
gcaaatcactaacaact

SEQ ID NO: 1480 - DNA, 18 bp, Artificial Sequence
  Antisense Oligonucleotide
tagcaaatcactaacaac

SEQ ID NO: 1481 - DNA, 19 bp, Artificial Sequence
  Antisense Oligonucleotide
atagcaaatcactaacaac

SEQ ID NO: 1482 - DNA, 17 bp, Artificial Sequence
  Antisense Oligonucleotide
agcaaatcactaacaac

SEQ ID NO: 1483 - DNA, 18 bp, Artificial Sequence
  Antisense Oligonucleotide
atagcaaatcactaacaa

SEQ ID NO: 1484 - DNA, 17 bp, Artificial Sequence
  Antisense Oligonucleotide
tagcaaatcactaacaa

SEQ ID NO: 1485 - DNA, 18 bp, Artificial Sequence
  Antisense Oligonucleotide
aaaaatcttataatatat

SEQ ID NO: 1486 - DNA, 18 bp, Artificial Sequence
  Antisense Oligonucleotide
taaaaatcttataatata

SEQ ID NO: 1487 - DNA, 19 bp, Artificial Sequence
  Antisense Oligonucleotide
ctaaaaatcttataatata

SEQ ID NO: 1488 - DNA, 20 bp, Artificial Sequence
  Antisense Oligonucleotide
cctaaaaatcttataatata

SEQ ID NO: 1489 - DNA, 18 bp, Artificial Sequence
  Antisense Oligonucleotide
ctaaaaatcttataatat

SEQ ID NO: 1490 - DNA, 18 bp, Artificial Sequence
  Antisense Oligonucleotide
cctaaaaatcttataata

SEQ ID NO: 1491 - DNA, 19 bp, Artificial Sequence
  Antisense Oligonucleotide
acctaaaaatcttataata

SEQ ID NO: 1492 - DNA, 20 bp, Artificial Sequence
  Antisense Oligonucleotide
acacctaaaaatcttataat

SEQ ID NO: 1493 - DNA, 18 bp, Artificial Sequence
  Antisense Oligonucleotide
cacctaaaaatcttataa

SEQ ID NO: 1494 - DNA, 18 bp, Artificial Sequence
  Antisense Oligonucleotide
acacctaaaaatcttata

SEQ ID NO: 1495 - DNA, 19 bp, Artificial Sequence
  Antisense Oligonucleotide
gacacctaaaaatcttata

SEQ ID NO: 1496 - DNA, 18 bp, Artificial Sequence
  Antisense Oligonucleotide
gacacctaaaaatcttat

SEQ ID NO: 1497 - DNA, 19 bp, Artificial Sequence
  Antisense Oligonucleotide
agacacctaaaaatcttat

SEQ ID NO: 1498 - DNA, 17 bp, Artificial Sequence
  Antisense Oligonucleotide
gacacctaaaaatctta

SEQ ID NO: 1499 - DNA, 18 bp, Artificial Sequence
  Antisense Oligonucleotide
ttagacagtatcattaaa

SEQ ID NO: 1500 - DNA, 16 bp, Artificial Sequence
  Antisense Oligonucleotide
tagacagtatcattaa

SEQ ID NO: 1501 - DNA, 16 bp, Artificial Sequence
  Antisense Oligonucleotide
ttagacagtatcatta

SEQ ID NO: 1502 - DNA, 16 bp, Artificial Sequence
  Antisense Oligonucleotide
cttagacagtatcatt

SEQ ID NO: 1503 - DNA, 18 bp, Artificial Sequence
  Antisense Oligonucleotide
attcttagacagtatcat

SEQ ID NO: 1504 - DNA, 18 bp, Artificial Sequence
  Antisense Oligonucleotide
tattcttagacagtatca

SEQ ID NO: 1505 - DNA, 16 bp, Artificial Sequence
  Antisense Oligonucleotide
attcttagacagtatc

SEQ ID NO: 1506 - DNA, 18 bp, Artificial Sequence
  Antisense Oligonucleotide
attattcttagacagtat

SEQ ID NO: 1507 - DNA, 16 bp, Artificial Sequence
  Antisense Oligonucleotide
ttattcttagacagta

SEQ ID NO: 1508 - DNA, 16 bp, Artificial Sequence
  Antisense Oligonucleotide
cattattcttagacag

SEQ ID NO: 1509 - DNA, 16 bp, Artificial Sequence
  Antisense Oligonucleotide
caatacgtcattattc

SEQ ID NO: 1510 - DNA, 16 bp, Artificial Sequence
  Antisense Oligonucleotide
cacaatacgtcattat

SEQ ID NO: 1511 - DNA, 16 bp, Artificial Sequence
  Antisense Oligonucleotide
tcacaatacgtcatta

SEQ ID NO: 1512 - DNA, 16 bp, Artificial Sequence
  Antisense Oligonucleotide
ttcacaatacgtcatt

SEQ ID NO: 1513 - DNA, 18 bp, Artificial Sequence
  Antisense Oligonucleotide
atttcacaatacgtcatt

SEQ ID NO: 1514 - DNA, 16 bp, Artificial Sequence
  Antisense Oligonucleotide
tttcacaatacgtcat

SEQ ID NO: 1515 - DNA, 17 bp, Artificial Sequence
  Antisense Oligonucleotide
atttcacaatacgtcat

SEQ ID NO: 1516 - DNA, 16 bp, Artificial Sequence
  Antisense Oligonucleotide
atttcacaatacgtca

SEQ ID NO: 1517 - DNA, 16 bp, Artificial Sequence
  Antisense Oligonucleotide
aatttcacaatacgtc

SEQ ID NO: 1518 - DNA, 16 bp, Artificial Sequence
  Antisense Oligonucleotide
caaatttcacaatacg

SEQ ID NO: 1519 - DNA, 20 bp, Artificial Sequence
  Antisense Oligonucleotide
attaacaaatttcacaatac

SEQ ID NO: 1520 - DNA, 20 bp, Artificial Sequence
  Antisense Oligonucleotide
atatattaacaaatttcaca

SEQ ID NO: 1521 - DNA, 20 bp, Artificial Sequence
  Antisense Oligonucleotide
tatatattaacaaatttcac

SEQ ID NO: 1522 - DNA, 19 bp, Artificial Sequence
  Antisense Oligonucleotide
atatattaacaaatttcac

SEQ ID NO: 1523 - DNA, 18 bp, Artificial Sequence
  Antisense Oligonucleotide
atatattaacaaatttca

SEQ ID NO: 1524 - DNA, 19 bp, Artificial Sequence
  Antisense Oligonucleotide
tatatattaacaaatttca

SEQ ID NO: 1525 - DNA, 20 bp, Artificial Sequence
  Antisense Oligonucleotide
atatatattaacaaatttca

SEQ ID NO: 1526 - DNA, 18 bp, Artificial Sequence
  Antisense Oligonucleotide
tatatattaacaaatttc

SEQ ID NO: 1527 - DNA, 19 bp, Artificial Sequence
  Antisense Oligonucleotide
atatatattaacaaatttc

SEQ ID NO: 1528 - DNA, 20 bp, Artificial Sequence
  Antisense Oligonucleotide
tatatatattaacaaatttc

SEQ ID NO: 1529 - DNA, 18 bp, Artificial Sequence
  Antisense Oligonucleotide
atatatattaacaaattt

SEQ ID NO: 1530 - DNA, 18 bp, Artificial Sequence
  Antisense Oligonucleotide
tatatatattaacaaatt

SEQ ID NO: 1531 - DNA, 18 bp, Artificial Sequence
  Antisense Oligonucleotide
ttatatatattaacaaat

SEQ ID NO: 1532 - DNA, 18 bp, Artificial Sequence
  Antisense Oligonucleotide
attatatatattaacaaa

SEQ ID NO: 1533 - DNA, 18 bp, Artificial Sequence
  Antisense Oligonucleotide
tattatatatattaacaa

SEQ ID NO: 1534 - DNA, 18 bp, Artificial Sequence
  Antisense Oligonucleotide
gtattatatatattaaca

SEQ ID NO: 1535 - DNA, 18 bp, Artificial Sequence
  Antisense Oligonucleotide
agtattatatatattaac

SEQ ID NO: 1536 - DNA, 18 bp, Artificial Sequence
  Antisense Oligonucleotide
aagtattatatatattaa

SEQ ID NO: 1537 - DNA, 20 bp, Artificial Sequence
  Antisense Oligonucleotide
tttaagtattatatatatta

SEQ ID NO: 1538 - DNA, 16 bp, Artificial Sequence
  Antisense Oligonucleotide
catagtttcatgctca

SEQ ID NO: 1539 - DNA, 16 bp, Artificial Sequence
  Antisense Oligonucleotide
tttataggtgcatagt

SEQ ID NO: 1540 - DNA, 16 bp, Artificial Sequence
  Antisense Oligonucleotide
tatttataggtgcata

SEQ ID NO: 1541 - DNA, 18 bp, Artificial Sequence
  Antisense Oligonucleotide
ttatatacaaacacaagt

SEQ ID NO: 1542 - DNA, 18 bp, Artificial Sequence
  Antisense Oligonucleotide
tttatatacaaacacaag

SEQ ID NO: 1543 - DNA, 18 bp, Artificial Sequence
  Antisense Oligonucleotide
atttatatacaaacacaa

SEQ ID NO: 1544 - DNA, 19 bp, Artificial Sequence
  Antisense Oligonucleotide
catttatatacaaacacaa

SEQ ID NO: 1545 - DNA, 20 bp, Artificial Sequence
  Antisense Oligonucleotide
ccatttatatacaaacacaa

SEQ ID NO: 1546 - DNA, 18 bp, Artificial Sequence
  Antisense Oligonucleotide
catttatatacaaacaca

SEQ ID NO: 1547 - DNA, 19 bp, Artificial Sequence
  Antisense Oligonucleotide
ccatttatatacaaacaca

SEQ ID NO: 1548 - DNA, 20 bp, Artificial Sequence
  Antisense Oligonucleotide
accatttatatacaaacaca

SEQ ID NO: 1549 - DNA, 20 bp, Artificial Sequence
  Antisense Oligonucleotide
caccatttatatacaaacac

SEQ ID NO: 1550 - DNA, 18 bp, Artificial Sequence
  Antisense Oligonucleotide
ccatttatatacaaacac

SEQ ID NO: 1551 - DNA, 19 bp, Artificial Sequence
  Antisense Oligonucleotide
accatttatatacaaacac

SEQ ID NO: 1552 - DNA, 20 bp, Artificial Sequence
  Antisense Oligonucleotide
ctcaccatttatatacaaac

SEQ ID NO: 1553 - DNA, 20 bp, Artificial Sequence
  Antisense Oligonucleotide
tctcaccatttatatacaaa

SEQ ID NO: 1554 - DNA, 20 bp, Artificial Sequence
  Antisense Oligonucleotide
ttctcaccatttatatacaa

SEQ ID NO: 1555 - DNA, 20 bp, Artificial Sequence
  Antisense Oligonucleotide
attctcaccatttatataca

SEQ ID NO: 1556 - DNA, 18 bp, Artificial Sequence
  Antisense Oligonucleotide
tctcaccatttatataca

SEQ ID NO: 1557 - DNA, 18 bp, Artificial Sequence
  Antisense Oligonucleotide
ttctcaccatttatatac

SEQ ID NO: 1558 - DNA, 18 bp, Artificial Sequence
  Antisense Oligonucleotide
attctcaccatttatata

SEQ ID NO: 1559 - DNA, 20 bp, Artificial Sequence
  Antisense Oligonucleotide
taattctcaccatttatata

SEQ ID NO: 1560 - DNA, 20 bp, Artificial Sequence
  Antisense Oligonucleotide
ttaattctcaccatttatat

SEQ ID NO: 1561 - DNA, 20 bp, Artificial Sequence
  Antisense Oligonucleotide
tttaattctcaccatttata

SEQ ID NO: 1562 - DNA, 20 bp, Artificial Sequence
  Antisense Oligonucleotide
ttttaattctcaccatttat

SEQ ID NO: 1563 - DNA, 20 bp, Artificial Sequence
  Antisense Oligonucleotide
attttaattctcaccattta

SEQ ID NO: 1564 - DNA, 20 bp, Artificial Sequence
  Antisense Oligonucleotide
tattttaattctcaccattt

SEQ ID NO: 1565 - DNA, 20 bp, Artificial Sequence
  Antisense Oligonucleotide
ttattttaattctcaccatt

SEQ ID NO: 1566 - DNA, 16 bp, Artificial Sequence
  Antisense Oligonucleotide
aaagtgagatgggata

SEQ ID NO: 1567 - DNA, 16 bp, Artificial Sequence
  Antisense Oligonucleotide
cagttcttaattcatg

SEQ ID NO: 1568 - DNA, 18 bp, Artificial Sequence
  Antisense Oligonucleotide
ttctaaaattcctccttc

SEQ ID NO: 1569 - DNA, 18 bp, Artificial Sequence
  Antisense Oligonucleotide
cttctaaaattcctcctt

SEQ ID NO: 1570 - DNA, 18 bp, Artificial Sequence
  Antisense Oligonucleotide
tcttctaaaattcctcct

SEQ ID NO: 1571 - DNA, 18 bp, Artificial Sequence
  Antisense Oligonucleotide
ctcttctaaaattcctcc

SEQ ID NO: 1572 - DNA, 20 bp, Artificial Sequence
  Antisense Oligonucleotide
tacctcttctaaaattcctc

SEQ ID NO: 1573 - DNA, 18 bp, Artificial Sequence
  Antisense Oligonucleotide
cctcttctaaaattcctc

SEQ ID NO: 1574 - DNA, 18 bp, Artificial Sequence
  Antisense Oligonucleotide
acctcttctaaaattcct

SEQ ID NO: 1575 - DNA, 18 bp, Artificial Sequence
  Antisense Oligonucleotide
tacctcttctaaaattcc

SEQ ID NO: 1576 - DNA, 20 bp, Artificial Sequence
  Antisense Oligonucleotide
tctacctcttctaaaattcc

SEQ ID NO: 1577 - DNA, 18 bp, Artificial Sequence
  Antisense Oligonucleotide
ctacctcttctaaaattc

SEQ ID NO: 1578 - DNA, 20 bp, Artificial Sequence
  Antisense Oligonucleotide
ctctacctcttctaaaattc

SEQ ID NO: 1579 - DNA, 18 bp, Artificial Sequence
  Antisense Oligonucleotide
tccattttctctacctct

SEQ ID NO: 1580 - DNA, 18 bp, Artificial Sequence
  Antisense Oligonucleotide
ttccattttctctacctc

SEQ ID NO: 1581 - DNA, 18 bp, Artificial Sequence
  Antisense Oligonucleotide
agggttaatgttccattt

SEQ ID NO: 1582 - DNA, 16 bp, Artificial Sequence
  Antisense Oligonucleotide
attattcttagacagt

SEQ ID NO: 1583 - DNA, 18 bp, Artificial Sequence
  Antisense Oligonucleotide
tagggttaatgttccatt

SEQ ID NO: 1584 - DNA, 16 bp, Artificial Sequence
  Antisense Oligonucleotide
agggttaatgttccat

SEQ ID NO: 1585 - DNA, 16 bp, Artificial Sequence
  Antisense Oligonucleotide
tagggttaatgttcca

SEQ ID NO: 1586 - DNA, 16 bp, Artificial Sequence
  Antisense Oligonucleotide
gtagggttaatgttcc

SEQ ID NO: 1587 - DNA, 16 bp, Artificial Sequence
  Antisense Oligonucleotide
tgtagggttaatgttc

SEQ ID NO: 1588 - DNA, 16 bp, Artificial Sequence
  Antisense Oligonucleotide
gtgtagggttaatgtt

SEQ ID NO: 1589 - DNA, 16 bp, Artificial Sequence
  Antisense Oligonucleotide
agtgtagggttaatgt

SEQ ID NO: 1590 - DNA, 16 bp, Artificial Sequence
  Antisense Oligonucleotide
caataattaatcacag

SEQ ID NO: 1591 - DNA, 16 bp, Artificial Sequence
  Antisense Oligonucleotide
gattgaagggagaaat

SEQ ID NO: 1592 - DNA, 16 bp, Artificial Sequence
  Antisense Oligonucleotide
atcttctacactgctt

SEQ ID NO: 1593 - DNA, 16 bp, Artificial Sequence
  Antisense Oligonucleotide
aatgtgtcttatggct

SEQ ID NO: 1594 - DNA, 16 bp, Artificial Sequence
  Antisense Oligonucleotide
gctaatgtgtcttatg

SEQ ID NO: 1595 - DNA, 16 bp, Artificial Sequence
  Antisense Oligonucleotide
aatatgtgctaatgtg

SEQ ID NO: 1596 - DNA, 16 bp, Artificial Sequence
  Antisense Oligonucleotide
taatatgtgctaatgt

SEQ ID NO: 1597 - DNA, 16 bp, Artificial Sequence
  Antisense Oligonucleotide
atgtgctaatatgtgc

SEQ ID NO: 1598 - DNA, 18 bp, Artificial Sequence
  Antisense Oligonucleotide
tgaatgtgctaatatgtg

SEQ ID NO: 1599 - DNA, 16 bp, Artificial Sequence
  Antisense Oligonucleotide
gaatgtgctaatatgt

SEQ ID NO: 1600 - DNA, 18 bp, Artificial Sequence
  Antisense Oligonucleotide
cttgaatgtgctaatatg

SEQ ID NO: 1601 - DNA, 18 bp, Artificial Sequence
  Antisense Oligonucleotide
ccttgaatgtgctaatat

SEQ ID NO: 1602 - DNA, 16 bp, Artificial Sequence
  Antisense Oligonucleotide
cttgaatgtgctaata

SEQ ID NO: 1603 - DNA, 16 bp, Artificial Sequence
  Antisense Oligonucleotide
ttaaccacattctctc

SEQ ID NO: 1604 - DNA, 18 bp, Artificial Sequence
  Antisense Oligonucleotide
gtttaaaggcatttcctg

SEQ ID NO: 1605 - DNA, 18 bp, Artificial Sequence
  Antisense Oligonucleotide
tgtttaaaggcatttcct

SEQ ID NO: 1606 - DNA, 9 bp, Artificial Sequence
  Antisense Oligonucleotide
agagaattg

SEQ ID NO: 1607 - DNA, 20 bp, Artificial Sequence
  Antisense Oligonucleotide
tatatttggcaacatttaaa

SEQ ID NO: 1608 - DNA, 18 bp, Artificial Sequence
  Antisense Oligonucleotide
atatttggcaacatttaa

SEQ ID NO: 1609 - DNA, 18 bp, Artificial Sequence
  Antisense Oligonucleotide
tatatttggcaacattta

SEQ ID NO: 1610 - DNA, 18 bp, Artificial Sequence
  Antisense Oligonucleotide
atatatttggcaacattt

SEQ ID NO: 1611 - DNA, 18 bp, Artificial Sequence
  Antisense Oligonucleotide
catatatttggcaacatt

SEQ ID NO: 1612 - DNA, 18 bp, Artificial Sequence
  Antisense Oligonucleotide
tcatatatttggcaacat

SEQ ID NO: 1613 - DNA, 20 bp, Artificial Sequence
  Antisense Oligonucleotide
aattcatatatttggcaaca

SEQ ID NO: 1614 - DNA, 20 bp, Artificial Sequence
  Antisense Oligonucleotide
gaattcatatatttggcaac

SEQ ID NO: 1615 - DNA, 18 bp, Artificial Sequence
  Antisense Oligonucleotide
aattcatatatttggcaa

SEQ ID NO: 1616 - DNA, 18 bp, Artificial Sequence
  Antisense Oligonucleotide
gaattcatatatttggca

SEQ ID NO: 1617 - DNA, 18 bp, Artificial Sequence
  Antisense Oligonucleotide
agaattcatatatttggc

SEQ ID NO: 1618 - DNA, 18 bp, Artificial Sequence
  Antisense Oligonucleotide
tagaattcatatatttgg

SEQ ID NO: 1619 - DNA, 18 bp, Artificial Sequence
  Antisense Oligonucleotide
ctagaattcatatatttg

SEQ ID NO: 1620 - DNA, 18 bp, Artificial Sequence
  Antisense Oligonucleotide
cctagaattcatatattt

SEQ ID NO: 1621 - DNA, 18 bp, Artificial Sequence
  Antisense Oligonucleotide
tcctagaattcatatatt

SEQ ID NO: 1622 - DNA, 18 bp, Artificial Sequence
  Antisense Oligonucleotide
atcctagaattcatatat

SEQ ID NO: 1623 - DNA, 18 bp, Artificial Sequence
  Antisense Oligonucleotide
taatagatcttccctgaa

SEQ ID NO: 1624 - DNA, 18 bp, Artificial Sequence
  Antisense Oligonucleotide
ttaatagatcttccctga

SEQ ID NO: 1625 - DNA, 18 bp, Artificial Sequence
  Antisense Oligonucleotide
gttaatagatcttccctg

SEQ ID NO: 1626 - DNA, 18 bp, Artificial Sequence
  Antisense Oligonucleotide
agttaatagatcttccct

SEQ ID NO: 1627 - DNA, 16 bp, Artificial Sequence
  Antisense Oligonucleotide
gttaatagatcttccc

SEQ ID NO: 1628 - DNA, 16 bp, Artificial Sequence
  Antisense Oligonucleotide
agttaatagatcttcc

SEQ ID NO: 1629 - DNA, 16 bp, Artificial Sequence
  Antisense Oligonucleotide
gagttaatagatcttc

SEQ ID NO: 1630 - DNA, 18 bp, Artificial Sequence
  Antisense Oligonucleotide
tcaccatcaagtttattt

SEQ ID NO: 1631 - DNA, 18 bp, Artificial Sequence
  Antisense Oligonucleotide
ttcaccatcaagtttatt

SEQ ID NO: 1632 - DNA, 16 bp, Artificial Sequence
  Antisense Oligonucleotide
tcaccatcaagtttat

SEQ ID NO: 1633 - DNA, 16 bp, Artificial Sequence
  Antisense Oligonucleotide
ttcaccatcaagttta

SEQ ID NO: 1634 - DNA, 18 bp, Artificial Sequence
  Antisense Oligonucleotide
ctttctactagtgacttt

SEQ ID NO: 1635 - DNA, 16 bp, Artificial Sequence
  Antisense Oligonucleotide
tttctactagtgactt

SEQ ID NO: 1636 - DNA, 16 bp, Artificial Sequence
  Antisense Oligonucleotide
ctttctactagtgact

SEQ ID NO: 1637 - DNA, 16 bp, Artificial Sequence
  Antisense Oligonucleotide
actttctactagtgac

SEQ ID NO: 1638 - DNA, 16 bp, Artificial Sequence
  Antisense Oligonucleotide
tactttctactagtga

SEQ ID NO: 1639 - DNA, 16 bp, Artificial Sequence
  Antisense Oligonucleotide
atactttctactagtg

SEQ ID NO: 1640 - DNA, 16 bp, Artificial Sequence
  Antisense Oligonucleotide
tatactttctactagt

SEQ ID NO: 1641 - DNA, 16 bp, Artificial Sequence
  Antisense Oligonucleotide
ttatactttctactag

SEQ ID NO: 1642 - DNA, 18 bp, Artificial Sequence
  Antisense Oligonucleotide
aaattatactttctacta

SEQ ID NO: 1643 - DNA, 20 bp, Artificial Sequence
  Antisense Oligonucleotide
ttgaaattatactttctact

SEQ ID NO: 1644 - DNA, 18 bp, Artificial Sequence
  Antisense Oligonucleotide
tgaaattatactttctac

SEQ ID NO: 1645 - DNA, 18 bp, Artificial Sequence
  Antisense Oligonucleotide
ttgaaattatactttcta

SEQ ID NO: 1646 - DNA, 18 bp, Artificial Sequence
  Antisense Oligonucleotide
cttgaaattatactttct

SEQ ID NO: 1647 - DNA, 20 bp, Artificial Sequence
  Antisense Oligonucleotide
tgtcttgaaattatactttc

SEQ ID NO: 1648 - DNA, 20 bp, Artificial Sequence
  Antisense Oligonucleotide
ctgtcttgaaattatacttt

SEQ ID NO: 1649 - DNA, 18 bp, Artificial Sequence
  Antisense Oligonucleotide
tgtcttgaaattatactt

SEQ ID NO: 1650 - DNA, 18 bp, Artificial Sequence
  Antisense Oligonucleotide
ctgtcttgaaattatact

SEQ ID NO: 1651 - DNA, 18 bp, Artificial Sequence
  Antisense Oligonucleotide
tctgtcttgaaattatac

SEQ ID NO: 1652 - DNA, 16 bp, Artificial Sequence
  Antisense Oligonucleotide
tagcatgtctagaata

SEQ ID NO: 1653 - DNA, 16 bp, Artificial Sequence
  Antisense Oligonucleotide
cattactcatgaatac

SEQ ID NO: 1654 - DNA, 16 bp, Artificial Sequence
  Antisense Oligonucleotide
acattactcatgaata

SEQ ID NO: 1655 - DNA, 16 bp, Artificial Sequence
  Antisense Oligonucleotide
cacattactcatgaat

SEQ ID NO: 1656 - DNA, 16 bp, Artificial Sequence
  Antisense Oligonucleotide
atatcacattactcat

SEQ ID NO: 1657 - DNA, 18 bp, Artificial Sequence
  Antisense Oligonucleotide
atatatcacattactcat

SEQ ID NO: 1658 - DNA, 19 bp, Artificial Sequence
  Antisense Oligonucleotide
tatatatcacattactcat

SEQ ID NO: 1659 - DNA, 20 bp, Artificial Sequence
  Antisense Oligonucleotide
atatatatcacattactcat

SEQ ID NO: 1660 - DNA, 16 bp, Artificial Sequence
  Antisense Oligonucleotide
tatatcacattactca

SEQ ID NO: 1661 - DNA, 19 bp, Artificial Sequence
  Antisense Oligonucleotide
atatatatcacattactca

SEQ ID NO: 1662 - DNA, 20 bp, Artificial Sequence
  Antisense Oligonucleotide
aatatatatcacattactca

SEQ ID NO: 1663 - DNA, 18 bp, Artificial Sequence
  Antisense Oligonucleotide
atatatatcacattactc

SEQ ID NO: 1664 - DNA, 20 bp, Artificial Sequence
  Antisense Oligonucleotide
caatatatatcacattactc

SEQ ID NO: 1665 - DNA, 19 bp, Artificial Sequence
  Antisense Oligonucleotide
aatatatatcacattactc

SEQ ID NO: 1666 - DNA, 20 bp, Artificial Sequence
  Antisense Oligonucleotide
ccaatatatatcacattact

SEQ ID NO: 1667 - DNA, 19 bp, Artificial Sequence
  Antisense Oligonucleotide
caatatatatcacattact

SEQ ID NO: 1668 - DNA, 20 bp, Artificial Sequence
  Antisense Oligonucleotide
cccaatatatatcacattac

SEQ ID NO: 1669 - DNA, 18 bp, Artificial Sequence
  Antisense Oligonucleotide
caatatatatcacattac

SEQ ID NO: 1670 - DNA, 19 bp, Artificial Sequence
  Antisense Oligonucleotide
ccaatatatatcacattac

SEQ ID NO: 1671 - DNA, 18 bp, Artificial Sequence
  Antisense Oligonucleotide
ccaatatatatcacatta

SEQ ID NO: 1672 - DNA, 19 bp, Artificial Sequence
  Antisense Oligonucleotide
cccaatatatatcacatta

SEQ ID NO: 1673 - DNA, 18 bp, Artificial Sequence
  Antisense Oligonucleotide
cccaatatatatcacatt

SEQ ID NO: 1674 - DNA, 19 bp, Artificial Sequence
  Antisense Oligonucleotide
gcccaatatatatcacatt

SEQ ID NO: 1675 - DNA, 18 bp, Artificial Sequence
  Antisense Oligonucleotide
gcccaatatatatcacat

SEQ ID NO: 1676 - DNA, 16 bp, Artificial Sequence
  Antisense Oligonucleotide
cccaatatatatcaca

SEQ ID NO: 1677 - DNA, 17 bp, Artificial Sequence
  Antisense Oligonucleotide
gcccaatatatatcaca

SEQ ID NO: 1678 - DNA, 18 bp, Artificial Sequence
  Antisense Oligonucleotide
atagtcactcattcctcc

SEQ ID NO: 1679 - DNA, 18 bp, Artificial Sequence
  Antisense Oligonucleotide
tatagtcactcattcctc

SEQ ID NO: 1680 - DNA, 18 bp, Artificial Sequence
  Antisense Oligonucleotide
ccttatagtcactcattc

SEQ ID NO: 1681 - DNA, 16 bp, Artificial Sequence
  Antisense Oligonucleotide
ccttatagtcactcat

SEQ ID NO: 1682 - DNA, 18 bp, Artificial Sequence
  Antisense Oligonucleotide
catccttatagtcactca

SEQ ID NO: 1683 - DNA, 18 bp, Artificial Sequence
  Antisense Oligonucleotide
ccatccttatagtcactc

SEQ ID NO: 1684 - DNA, 16 bp, Artificial Sequence
  Antisense Oligonucleotide
catccttatagtcact

SEQ ID NO: 1685 - DNA, 16 bp, Artificial Sequence
  Antisense Oligonucleotide
ccatccttatagtcac

SEQ ID NO: 1686 - DNA, 16 bp, Artificial Sequence
  Antisense Oligonucleotide
accatccttatagtca

SEQ ID NO: 1687 - DNA, 16 bp, Artificial Sequence
  Antisense Oligonucleotide
aaccatccttatagtc

SEQ ID NO: 1688 - DNA, 16 bp, Artificial Sequence
  Antisense Oligonucleotide
gtaaccatccttatag

SEQ ID NO: 1689 - DNA, 16 bp, Artificial Sequence
  Antisense Oligonucleotide
gcactctgtagtagtc

SEQ ID NO: 1690 - DNA, 16 bp, Artificial Sequence
  Antisense Oligonucleotide
agcactctgtagtagt

SEQ ID NO: 1691 - DNA, 18 bp, Artificial Sequence
  Antisense Oligonucleotide
cttagcactctgtagtag

SEQ ID NO: 1692 - DNA, 18 bp, Artificial Sequence
  Antisense Oligonucleotide
gcttagcactctgtagta

SEQ ID NO: 1693 - DNA, 16 bp, Artificial Sequence
  Antisense Oligonucleotide
cttagcactctgtagt

SEQ ID NO: 1694 - DNA, 16 bp, Artificial Sequence
  Antisense Oligonucleotide
gcttagcactctgtag

SEQ ID NO: 1695 - DNA, 16 bp, Artificial Sequence
  Antisense Oligonucleotide
agcttagcactctgta

SEQ ID NO: 1696 - DNA, 16 bp, Artificial Sequence
  Antisense Oligonucleotide
cagcttagcactctgt

SEQ ID NO: 1697 - DNA, 16 bp, Artificial Sequence
  Antisense Oligonucleotide
gcagcttagcactctg

SEQ ID NO: 1698 - DNA, 16 bp, Artificial Sequence
  Antisense Oligonucleotide
tgcagcttagcactct

SEQ ID NO: 1699 - DNA, 16 bp, Artificial Sequence
  Antisense Oligonucleotide
atgcagcttagcactc

SEQ ID NO: 1700 - DNA, 18 bp, Artificial Sequence
  Antisense Oligonucleotide
cttaccatttctctctag

SEQ ID NO: 1701 - DNA, 18 bp, Artificial Sequence
  Antisense Oligonucleotide
acttaccatttctctcta

SEQ ID NO: 1702 - DNA, 18 bp, Artificial Sequence
  Antisense Oligonucleotide
aacttaccatttctctct

SEQ ID NO: 1703 - DNA, 18 bp, Artificial Sequence
  Antisense Oligonucleotide
aaacttaccatttctctc

SEQ ID NO: 1704 - DNA, 18 bp, Artificial Sequence
  Antisense Oligonucleotide
acataacttaaataaaac

SEQ ID NO: 1705 - DNA, 20 bp, Artificial Sequence
  Antisense Oligonucleotide
ttaaacataacttaaataaa

SEQ ID NO: 1706 - DNA, 18 bp, Artificial Sequence
  Antisense Oligonucleotide
taaacataacttaaataa

SEQ ID NO: 1707 - DNA, 18 bp, Artificial Sequence
  Antisense Oligonucleotide
ttaaacataacttaaata

SEQ ID NO: 1708 - DNA, 20 bp, Artificial Sequence
  Antisense Oligonucleotide
tgcttaaacataacttaaat

SEQ ID NO: 1709 - DNA, 19 bp, Artificial Sequence
  Antisense Oligonucleotide
gcttaaacataacttaaat

SEQ ID NO: 1710 - DNA, 18 bp, Artificial Sequence
  Antisense Oligonucleotide
gcttaaacataacttaaa

SEQ ID NO: 1711 - DNA, 18 bp, Artificial Sequence
  Antisense Oligonucleotide
tgcttaaacataacttaa

SEQ ID NO: 1712 - DNA, 16 bp, Artificial Sequence
  Antisense Oligonucleotide
gcttaaacataactta

SEQ ID NO: 1713 - DNA, 18 bp, Artificial Sequence
  Antisense Oligonucleotide
ttgcttaaacataactta

SEQ ID NO: 1714 - DNA, 18 bp, Artificial Sequence
  Antisense Oligonucleotide
cttgcttaaacataactt

SEQ ID NO: 1715 - DNA, 16 bp, Artificial Sequence
  Antisense Oligonucleotide
ttgcttaaacataact

SEQ ID NO: 1716 - DNA, 17 bp, Artificial Sequence
  Antisense Oligonucleotide
cttgcttaaacataact

SEQ ID NO: 1717 - DNA, 16 bp, Artificial Sequence
  Antisense Oligonucleotide
cttgcttaaacataac

SEQ ID NO: 1718 - DNA, 18 bp, Artificial Sequence
  Antisense Oligonucleotide
ttccttgcttaaacataa

SEQ ID NO: 1719 - DNA, 18 bp, Artificial Sequence
  Antisense Oligonucleotide
tttccttgcttaaacata

SEQ ID NO: 1720 - DNA, 20 bp, Artificial Sequence
  Antisense Oligonucleotide
tcctttccttgcttaaacat

SEQ ID NO: 1721 - DNA, 18 bp, Artificial Sequence
  Antisense Oligonucleotide
cctttccttgcttaaaca

SEQ ID NO: 1722 - DNA, 18 bp, Artificial Sequence
  Antisense Oligonucleotide
tcctttccttgcttaaac

SEQ ID NO: 1723 - DNA, 18 bp, Artificial Sequence
  Antisense Oligonucleotide
ataacaaatcctttcctt

SEQ ID NO: 1724 - DNA, 18 bp, Artificial Sequence
  Antisense Oligonucleotide
aataacaaatcctttcct

SEQ ID NO: 1725 - DNA, 18 bp, Artificial Sequence
  Antisense Oligonucleotide
caataacaaatcctttcc

SEQ ID NO: 1726 - DNA, 18 bp, Artificial Sequence
  Antisense Oligonucleotide
tcaataacaaatcctttc

SEQ ID NO: 1727 - DNA, 18 bp, Artificial Sequence
  Antisense Oligonucleotide
ttcaataacaaatccttt

SEQ ID NO: 1728 - DNA, 16 bp, Artificial Sequence
  Antisense Oligonucleotide
gttcaataacaaatcc

SEQ ID NO: 1729 - DNA, 16 bp, Artificial Sequence
  Antisense Oligonucleotide
tatactgttcaataac

SEQ ID NO: 1730 - DNA, 18 bp, Artificial Sequence
  Antisense Oligonucleotide
aaatatactgttcaataa

SEQ ID NO: 1731 - DNA, 18 bp, Artificial Sequence
  Antisense Oligonucleotide
gaaatatactgttcaata

SEQ ID NO: 1732 - DNA, 18 bp, Artificial Sequence
  Antisense Oligonucleotide
tgaaatatactgttcaat

SEQ ID NO: 1733 - DNA, 18 bp, Artificial Sequence
  Antisense Oligonucleotide
ctgaaatatactgttcaa

SEQ ID NO: 1734 - DNA, 18 bp, Artificial Sequence
  Antisense Oligonucleotide
cctgaaatatactgttca

SEQ ID NO: 1735 - DNA, 16 bp, Artificial Sequence
  Antisense Oligonucleotide
ctgaaatatactgttc

SEQ ID NO: 1736 - DNA, 18 bp, Artificial Sequence
  Antisense Oligonucleotide
ttcctgaaatatactgtt

SEQ ID NO: 1737 - DNA, 18 bp, Artificial Sequence
  Antisense Oligonucleotide
cttcctgaaatatactgt

SEQ ID NO: 1738 - DNA, 18 bp, Artificial Sequence
  Antisense Oligonucleotide
ccttcctgaaatatactg

SEQ ID NO: 1739 - DNA, 18 bp, Artificial Sequence
  Antisense Oligonucleotide
accttcctgaaatatact

SEQ ID NO: 1740 - DNA, 20 bp, Artificial Sequence
  Antisense Oligonucleotide
ctaaccttcctgaaatatac

SEQ ID NO: 1741 - DNA, 20 bp, Artificial Sequence
  Antisense Oligonucleotide
ttctaaccttcctgaaatat

SEQ ID NO: 1742 - DNA, 18 bp, Artificial Sequence
  Antisense Oligonucleotide
tctaaccttcctgaaata

SEQ ID NO: 1743 - DNA, 18 bp, Artificial Sequence
  Antisense Oligonucleotide
ttctaaccttcctgaaat

SEQ ID NO: 1744 - DNA, 18 bp, Artificial Sequence
  Antisense Oligonucleotide
tttctaaccttcctgaaa

SEQ ID NO: 1745 - DNA, 18 bp, Artificial Sequence
  Antisense Oligonucleotide
atttaaaatatatcctaa

SEQ ID NO: 1746 - DNA, 18 bp, Artificial Sequence
  Antisense Oligonucleotide
gctttaggtagatttaaa

SEQ ID NO: 1747 - DNA, 16 bp, Artificial Sequence
  Antisense Oligonucleotide
ctttaggtagatttaa

SEQ ID NO: 1748 - DNA, 18 bp, Artificial Sequence
  Antisense Oligonucleotide
aatatgctgctttaggta

SEQ ID NO: 1749 - DNA, 18 bp, Artificial Sequence
  Antisense Oligonucleotide
aaatatgctgctttaggt

SEQ ID NO: 1750 - DNA, 16 bp, Artificial Sequence
  Antisense Oligonucleotide
aatatgctgctttagg

SEQ ID NO: 1751 - DNA, 18 bp, Artificial Sequence
  Antisense Oligonucleotide
tctatttcttaatttaat

SEQ ID NO: 1752 - DNA, 18 bp, Artificial Sequence
  Antisense Oligonucleotide
ctctatttcttaatttaa

SEQ ID NO: 1753 - DNA, 18 bp, Artificial Sequence
  Antisense Oligonucleotide
cctctatttcttaattta

SEQ ID NO: 1754 - DNA, 18 bp, Artificial Sequence
  Antisense Oligonucleotide
tcctctatttcttaattt

SEQ ID NO: 1755 - DNA, 18 bp, Artificial Sequence
  Antisense Oligonucleotide
aactttcctaatctcaaa

SEQ ID NO: 1756 - DNA, 18 bp, Artificial Sequence
  Antisense Oligonucleotide
caactttcctaatctcaa

SEQ ID NO: 1757 - DNA, 18 bp, Artificial Sequence
  Antisense Oligonucleotide
acaactttcctaatctca

SEQ ID NO: 1758 - DNA, 16 bp, Artificial Sequence
  Antisense Oligonucleotide
caactttcctaatctc

SEQ ID NO: 1759 - DNA, 18 bp, Artificial Sequence
  Antisense Oligonucleotide
tcacaactttcctaatct

SEQ ID NO: 1760 - DNA, 16 bp, Artificial Sequence
  Antisense Oligonucleotide
cacaactttcctaatc

SEQ ID NO: 1761 - DNA, 16 bp, Artificial Sequence
  Antisense Oligonucleotide
tcacaactttcctaat

SEQ ID NO: 1762 - DNA, 16 bp, Artificial Sequence
  Antisense Oligonucleotide
gtcacaactttcctaa

SEQ ID NO: 1763 - DNA, 18 bp, Artificial Sequence
  Antisense Oligonucleotide
ataaatccttaaattcat

SEQ ID NO: 1764 - DNA, 20 bp, Artificial Sequence
  Antisense Oligonucleotide
cacataaatccttaaattca

SEQ ID NO: 1765 - DNA, 20 bp, Artificial Sequence
  Antisense Oligonucleotide
ccacataaatccttaaattc

SEQ ID NO: 1766 - DNA, 20 bp, Artificial Sequence
  Antisense Oligonucleotide
tccacataaatccttaaatt

SEQ ID NO: 1767 - DNA, 18 bp, Artificial Sequence
  Antisense Oligonucleotide
ccacataaatccttaaat

SEQ ID NO: 1768 - DNA, 18 bp, Artificial Sequence
  Antisense Oligonucleotide
tccacataaatccttaaa

SEQ ID NO: 1769 - DNA, 18 bp, Artificial Sequence
  Antisense Oligonucleotide
tatccacataaatcctta

SEQ ID NO: 1770 - DNA, 16 bp, Artificial Sequence
  Antisense Oligonucleotide
tatccacataaatcct

SEQ ID NO: 1771 - DNA, 18 bp, Artificial Sequence
  Antisense Oligonucleotide
tttgtatccacataaatc

SEQ ID NO: 1772 - DNA, 18 bp, Artificial Sequence
  Antisense Oligonucleotide
aatttgtatccacataaa

SEQ ID NO: 1773 - DNA, 20 bp, Artificial Sequence
  Antisense Oligonucleotide
ggagaatttgtatccacata

SEQ ID NO: 1774 - DNA, 18 bp, Artificial Sequence
  Antisense Oligonucleotide
gagaatttgtatccacat

SEQ ID NO: 1775 - DNA, 18 bp, Artificial Sequence
  Antisense Oligonucleotide
ggagaatttgtatccaca

SEQ ID NO: 1776 - DNA, 16 bp, Artificial Sequence
  Antisense Oligonucleotide
gagaatttgtatccac

SEQ ID NO: 1777 - DNA, 16 bp, Artificial Sequence
  Antisense Oligonucleotide
ggagaatttgtatcca

SEQ ID NO: 1778 - DNA, 20 bp, Artificial Sequence
  Antisense Oligonucleotide
ttaaaggagaatttgtatcc

SEQ ID NO: 1779 - DNA, 20 bp, Artificial Sequence
  Antisense Oligonucleotide
tttaaaggagaatttgtatc

SEQ ID NO: 1780 - DNA, 18 bp, Artificial Sequence
  Antisense Oligonucleotide
ttaaaggagaatttgtat

SEQ ID NO: 1781 - DNA, 18 bp, Artificial Sequence
  Antisense Oligonucleotide
cactttaaaggagaattt

SEQ ID NO: 1782 - DNA, 18 bp, Artificial Sequence
  Antisense Oligonucleotide
acactttaaaggagaatt

SEQ ID NO: 1783 - DNA, 18 bp, Artificial Sequence
  Antisense Oligonucleotide
aatattaagggaagaaac

SEQ ID NO: 1784 - DNA, 20 bp, Artificial Sequence
  Antisense Oligonucleotide
ataaatattaagggaagaaa

SEQ ID NO: 1785 - DNA, 18 bp, Artificial Sequence
  Antisense Oligonucleotide
taaatattaagggaagaa

SEQ ID NO: 1786 - DNA, 20 bp, Artificial Sequence
  Antisense Oligonucleotide
agataaatattaagggaaga

SEQ ID NO: 1787 - DNA, 18 bp, Artificial Sequence
  Antisense Oligonucleotide
gataaatattaagggaag

SEQ ID NO: 1788 - DNA, 18 bp, Artificial Sequence
  Antisense Oligonucleotide
cagataaatattaaggga

SEQ ID NO: 1789 - DNA, 18 bp, Artificial Sequence
  Antisense Oligonucleotide
actattaagatatataaa

SEQ ID NO: 1790 - DNA, 18 bp, Artificial Sequence
  Antisense Oligonucleotide
aactattaagatatataa

SEQ ID NO: 1791 - DNA, 18 bp, Artificial Sequence
  Antisense Oligonucleotide
aaactattaagatatata

SEQ ID NO: 1792 - DNA, 18 bp, Artificial Sequence
  Antisense Oligonucleotide
taaactattaagatatat

SEQ ID NO: 1793 - DNA, 18 bp, Artificial Sequence
  Antisense Oligonucleotide
ataaactattaagatata

SEQ ID NO: 1794 - DNA, 18 bp, Artificial Sequence
  Antisense Oligonucleotide
aataaactattaagatat

SEQ ID NO: 1795 - DNA, 18 bp, Artificial Sequence
  Antisense Oligonucleotide
aaataaactattaagata

SEQ ID NO: 1796 - DNA, 18 bp, Artificial Sequence
  Antisense Oligonucleotide
caaataaactattaagat

SEQ ID NO: 1797 - DNA, 18 bp, Artificial Sequence
  Antisense Oligonucleotide
ccaaataaactattaaga

SEQ ID NO: 1798 - DNA, 18 bp, Artificial Sequence
  Antisense Oligonucleotide
cccaaataaactattaag

SEQ ID NO: 1799 - DNA, 18 bp, Artificial Sequence
  Antisense Oligonucleotide
tcccaaataaactattaa

SEQ ID NO: 1800 - DNA, 18 bp, Artificial Sequence
  Antisense Oligonucleotide
gtcccaaataaactatta

SEQ ID NO: 1801 - DNA, 18 bp, Artificial Sequence
  Antisense Oligonucleotide
ggtcccaaataaactatt

SEQ ID NO: 1802 - DNA, 16 bp, Artificial Sequence
  Antisense Oligonucleotide
gtcccaaataaactat

SEQ ID NO: 1803 - DNA, 18 bp, Artificial Sequence
  Antisense Oligonucleotide
ttggtcccaaataaacta

SEQ ID NO: 1804 - DNA, 16 bp, Artificial Sequence
  Antisense Oligonucleotide
tggtcccaaataaact

SEQ ID NO: 1805 - DNA, 16 bp, Artificial Sequence
  Antisense Oligonucleotide
ttggtcccaaataaac

SEQ ID NO: 1806 - DNA, 18 bp, Artificial Sequence
  Antisense Oligonucleotide
ataacttgggagaatgta

SEQ ID NO: 1807 - DNA, 20 bp, Artificial Sequence
  Antisense Oligonucleotide
tgaataacttgggagaatgt

SEQ ID NO: 1808 - DNA, 18 bp, Artificial Sequence
  Antisense Oligonucleotide
gaataacttgggagaatg

SEQ ID NO: 1809 - DNA, 18 bp, Artificial Sequence
  Antisense Oligonucleotide
tgaataacttgggagaat

SEQ ID NO: 1810 - DNA, 18 bp, Artificial Sequence
  Antisense Oligonucleotide
ctgaataacttgggagaa

SEQ ID NO: 1811 - DNA, 18 bp, Artificial Sequence
  Antisense Oligonucleotide
gctgaataacttgggaga

SEQ ID NO: 1812 - DNA, 16 bp, Artificial Sequence
  Antisense Oligonucleotide
ctgaataacttgggag

SEQ ID NO: 1813 - DNA, 16 bp, Artificial Sequence
  Antisense Oligonucleotide
gctgaataacttggga

SEQ ID NO: 1814 - DNA, 20 bp, Artificial Sequence
  Antisense Oligonucleotide
atgaggctgaataacttggg

SEQ ID NO: 1815 - DNA, 18 bp, Artificial Sequence
  Antisense Oligonucleotide
tgaggctgaataacttgg

SEQ ID NO: 1816 - DNA, 18 bp, Artificial Sequence
  Antisense Oligonucleotide
atgaggctgaataacttg

SEQ ID NO: 1817 - DNA, 18 bp, Artificial Sequence
  Antisense Oligonucleotide
tatgaggctgaataactt

SEQ ID NO: 1818 - DNA, 16 bp, Artificial Sequence
  Antisense Oligonucleotide
atgaggctgaataact

SEQ ID NO: 1819 - DNA, 16 bp, Artificial Sequence
  Antisense Oligonucleotide
tatgaggctgaataac

SEQ ID NO: 1820 - DNA, 16 bp, Artificial Sequence
  Antisense Oligonucleotide
atatgaggctgaataa

SEQ ID NO: 1821 - DNA, 16 bp, Artificial Sequence
  Antisense Oligonucleotide
catatgaggctgaata

SEQ ID NO: 1822 - DNA, 16 bp, Artificial Sequence
  Antisense Oligonucleotide
gtcatatgaggctgaa

SEQ ID NO: 1823 - DNA, 16 bp, Artificial Sequence
  Antisense Oligonucleotide
tggagtcatatgaggc

SEQ ID NO: 1824 - DNA, 16 bp, Artificial Sequence
  Antisense Oligonucleotide
gtggagtcatatgagg

SEQ ID NO: 1825 - DNA, 18 bp, Artificial Sequence
  Antisense Oligonucleotide
acacattagattgttctg

SEQ ID NO: 1826 - DNA, 16 bp, Artificial Sequence
  Antisense Oligonucleotide
acacattagattgttc

SEQ ID NO: 1827 - DNA, 18 bp, Artificial Sequence
  Antisense Oligonucleotide
ataccaaaccacacatta

SEQ ID NO: 1828 - DNA, 18 bp, Artificial Sequence
  Antisense Oligonucleotide
aataccaaaccacacatt

SEQ ID NO: 1829 - DNA, 16 bp, Artificial Sequence
  Antisense Oligonucleotide
gaataccaaaccacac

SEQ ID NO: 1830 - DNA, 16 bp, Artificial Sequence
  Antisense Oligonucleotide
caaatagctacatact

SEQ ID NO: 1831 - DNA, 20 bp, Artificial Sequence
  Antisense Oligonucleotide
attatgtcacaaatagctac

SEQ ID NO: 1832 - DNA, 20 bp, Artificial Sequence
  Antisense Oligonucleotide
tattatgtcacaaatagcta

SEQ ID NO: 1833 - DNA, 18 bp, Artificial Sequence
  Antisense Oligonucleotide
attatgtcacaaatagct

SEQ ID NO: 1834 - DNA, 20 bp, Artificial Sequence
  Antisense Oligonucleotide
ttattatgtcacaaatagct

SEQ ID NO: 1835 - DNA, 18 bp, Artificial Sequence
  Antisense Oligonucleotide
tattatgtcacaaatagc

SEQ ID NO: 1836 - DNA, 20 bp, Artificial Sequence
  Antisense Oligonucleotide
tttattatgtcacaaatagc

SEQ ID NO: 1837 - DNA, 16 bp, Artificial Sequence
  Antisense Oligonucleotide
attatgtcacaaatag

SEQ ID NO: 1838 - DNA, 20 bp, Artificial Sequence
  Antisense Oligonucleotide
atttattatgtcacaaatag

SEQ ID NO: 1839 - DNA, 18 bp, Artificial Sequence
  Antisense Oligonucleotide
ttattatgtcacaaatag

SEQ ID NO: 1840 - DNA, 18 bp, Artificial Sequence
  Antisense Oligonucleotide
tttattatgtcacaaata

SEQ ID NO: 1841 - DNA, 16 bp, Artificial Sequence
  Antisense Oligonucleotide
tattatgtcacaaata

SEQ ID NO: 1842 - DNA, 18 bp, Artificial Sequence
  Antisense Oligonucleotide
atttattatgtcacaaat

SEQ ID NO: 1843 - DNA, 18 bp, Artificial Sequence
  Antisense Oligonucleotide
tatttattatgtcacaaa

SEQ ID NO: 1844 - DNA, 20 bp, Artificial Sequence
  Antisense Oligonucleotide
atatatttattatgtcacaa

SEQ ID NO: 1845 - DNA, 18 bp, Artificial Sequence
  Antisense Oligonucleotide
tatatttattatgtcaca

SEQ ID NO: 1846 - DNA, 18 bp, Artificial Sequence
  Antisense Oligonucleotide
atatatttattatgtcac

SEQ ID NO: 1847 - DNA, 18 bp, Artificial Sequence
  Antisense Oligonucleotide
gtatatatttattatgtc

SEQ ID NO: 1848 - DNA, 16 bp, Artificial Sequence
  Antisense Oligonucleotide
acactgtcgtcgaatg

SEQ ID NO: 1849 - DNA, 16 bp, Artificial Sequence
  Antisense Oligonucleotide
ttacaccacactgtcg

SEQ ID NO: 1850 - DNA, 16 bp, Artificial Sequence
  Antisense Oligonucleotide
tttacaccacactgtc

SEQ ID NO: 1851 - DNA, 16 bp, Artificial Sequence
  Antisense Oligonucleotide
ttggagcctacataga

SEQ ID NO: 1852 - DNA, 16 bp, Artificial Sequence
  Antisense Oligonucleotide
agccactgttgccaca

SEQ ID NO: 1853 - DNA, 16 bp, Artificial Sequence
  Antisense Oligonucleotide
cagccactgttgccac

SEQ ID NO: 1854 - DNA, 16 bp, Artificial Sequence
  Antisense Oligonucleotide
cttctcagccactgtt

SEQ ID NO: 1855 - DNA, 16 bp, Artificial Sequence
  Antisense Oligonucleotide
cttcattcttgcccaa

SEQ ID NO: 1856 - DNA, 16 bp, Artificial Sequence
  Antisense Oligonucleotide
tcttcattcttgccca

SEQ ID NO: 1857 - DNA, 16 bp, Artificial Sequence
  Antisense Oligonucleotide
ttcttcattcttgccc

SEQ ID NO: 1858 - DNA, 16 bp, Artificial Sequence
  Antisense Oligonucleotide
tccttcttcattcttg

SEQ ID NO: 1859 - DNA, 16 bp, Artificial Sequence
  Antisense Oligonucleotide
ttcctcagaaggcatt

SEQ ID NO: 1860 - DNA, 16 bp, Artificial Sequence
  Antisense Oligonucleotide
gatacccttcctcaga

SEQ ID NO: 1861 - DNA, 16 bp, Artificial Sequence
  Antisense Oligonucleotide
tgatacccttcctcag

SEQ ID NO: 1862 - DNA, 16 bp, Artificial Sequence
  Antisense Oligonucleotide
ttgatacccttcctca

SEQ ID NO: 1863 - DNA, 20 bp, Artificial Sequence
  Antisense Oligonucleotide
ctttacaccacactgtcgtc

SEQ ID NO: 1864 - DNA, 16 bp, Artificial Sequence
  Antisense Oligonucleotide
cttgatacccttcctc

SEQ ID NO: 1865 - DNA, 18 bp, Artificial Sequence
  Antisense Oligonucleotide
tttacaccacactgtcgt

SEQ ID NO: 1866 - DNA, 18 bp, Artificial Sequence
  Antisense Oligonucleotide
cctttacaccacactgtc

SEQ ID NO: 1867 - DNA, 20 bp, Artificial Sequence
  Antisense Oligonucleotide
tttacaccacactgtcgtcg

SEQ ID NO: 1868 - DNA, 16 bp, Artificial Sequence
  Antisense Oligonucleotide
cttgatacccttcctt

SEQ ID NO: 1869 - DNA, 18 bp, Artificial Sequence
  Antisense Oligonucleotide
tcctttacaccacactga

SEQ ID NO: 1870 - DNA, 20 bp, Artificial Sequence
  Antisense Oligonucleotide
aattcctttacaccacactc

SEQ ID NO: 1871 - DNA, 20 bp, Artificial Sequence
  Antisense Oligonucleotide
attcctttacaccacactct

SEQ ID NO: 1872 - DNA, 16 bp, Artificial Sequence
  Antisense Oligonucleotide
cctttacaccacactc

SEQ ID NO: 1873 - DNA, 18 bp, Artificial Sequence
  Antisense Oligonucleotide
ctttacaccacactcttt

SEQ ID NO: 1874 - DNA, 20 bp, Artificial Sequence
  Antisense Oligonucleotide
ctttacaccacactctttca

SEQ ID NO: 1875 - DNA, 18 bp, Artificial Sequence
  Antisense Oligonucleotide
tcctttacaccacactct

SEQ ID NO: 1876 - DNA, 18 bp, Artificial Sequence
  Antisense Oligonucleotide
tcctttacaccacactgt

SEQ ID NO: 1877 - DNA, 18 bp, Artificial Sequence
  Antisense Oligonucleotide
ttcctttacaccacactc

SEQ ID NO: 1878 - DNA, 18 bp, Artificial Sequence
  Antisense Oligonucleotide
aattcctttacaccatac

SEQ ID NO: 1879 - DNA, 15 bp, Artificial Sequence
  Antisense Oligonucleotide
tctgtcttggctttg

SEQ ID NO: 1880 - DNA, 16 bp, Artificial Sequence
  Antisense Oligonucleotide
atttccaaattcactt

SEQ ID NO: 1881 - DNA, 20 bp, Artificial Sequence
  Antisense Oligonucleotide
ccaaatcttataataactac

SEQ ID NO: 1882 - DNA, 16 bp, Artificial Sequence
  Antisense Oligonucleotide
ttcctttacaccacac
